(19) United States
(12) Patent Application Publication
(10) Pub. No.: US 2022/0062379 A1
(43) Pub. Date: Mar. 3, 2022

(54) METHODS AND COMPOSITIONS FOR MODULATING IMMUNE DYSREGULATION

(71) Applicants: Luis BARREIRO, Montreal (CA); The General Hospital Corporation, Boston, MA (US); The Regents of the University of California, Oakland, CA (US)

(72) Inventors: Howland Shaw WARREN, Boston, MA (US); David GREGORY, Boston, MA (US); Wenzhong XIAO, Boston, CA (US); Feifei HAN, Boston, MA (US); Luis BARREIRO, Montreal (CA); Judith HELLMAN, Oakland, CA (US)

(21) Appl. No.: 17/423,244

(22) PCT Filed: Jan. 17, 2020
(86) PCT No.: PCT/US2020/014087

§ 371 Date: Jul. 15, 2021

Related U.S. Application Data
(60) Provisional application No. 62/930,813, filed on Nov. 5, 2019.
(60) Provisional application No. 62/794,386, filed on Jan. 18, 2019.

(51) Int. Cl. A61K 38/17; C12Q 1/6883; G01N 33/68; A61K 31/403; A61K 31/4965; A61K 31/4985; A61K 45/06

(52) U.S. Cl. CPC A61K 38/1709; C12Q 1/6883; G01N 33/6893; A61K 31/403; G01N 2800/24; A61K 31/4985; A61K 45/06; C12Q 2600/158; A61K 31/4965

(57) ABSTRACT

The invention relates to a method for treating a disease of immune dysregulation or altering an immune response or both in a mammal Such methods include administering to the mammal a therapeutically effective amount of a modulating agent or subjecting the mammal to a modulating process, wherein the modulating agent or process alters the expression or activity of a gene target associated with a sensitive response or a resistant response to an inflammatory stimulus.

### CROSS-REFERENCE TO RELATED APPLICATIONS

[0001] This application claims benefit of U.S. Provisional Application No. 62/794,386, filed Jan. 18, 2019, and U.S. Provisional Application No. 62/930,813, filed Nov. 5, 2019, the contents of which are incorporated herein by reference in their entirety.

### STATEMENT AS TO FEDERALLY FUNDED RESEARCH

[0002] This invention was supported under contract number W911 NF-16-C-0079 awarded by the Defense Advanced Research Projects Agency. The government has certain rights in the invention.

### SEQUENCE LISTING

[0003] The instant application contains a Sequence Listing which has been submitted electronically in ASCII format and is hereby incorporated by reference in its entirety. Said ASCII copy, created on Jan. 15, 2020, is named 51363-002W05_Sequence_Listing_1.15.20_ST25, and is 1,448,149 bytes in size.

### BACKGROUND OF THE INVENTION

[0004] Vertebrate species vary tremendously in their innate resistance (or tolerance) to inflammatory stimuli. The pathways, however, that underlie this resistance (or tolerance) are poorly understood. There is accordingly an unmet need in the art for methods that not only identify targets responsible for regulating inflammation, but also for identifying compounds and methods for treating inflammatory diseases.

### SUMMARY OF THE INVENTION

[0005] In general, the invention, in one aspect, features a method for treating a disease of immune dysregulation (e.g., the onset of the disease) in a mammal, the method including administering to the mammal a therapeutically effective amount of a modulating agent or subjecting the mammal to a modulating process, wherein the modulating agent or process alters the expression or activity of a gene target associated with a sensitive response or a resistant response to an inflammatory stimulus.

[0006] In another aspect, the invention features a method for altering an immune response in a mammal, the method including administering to the mammal a therapeutically effective amount of a modulating agent or subjecting the mammal to a modulating process, wherein the modulating agent or process alters the expression or activity of a gene target associated with a sensitive response or a resistant response to an inflammatory stimulus.

[0007] In either of these aspects, the gene target is a gene or gene product associated with a sensitive response. In some embodiments, the gene is one or more of the following EMC9, IRAK4, NFATC2, PLA2G10, SARM1, PIP5K1A, PDIA4, ARPC4, BNIP3, CCDC65, CENPH, CHPT1, COMMD3, DR1, FGD1, FIGNL1, GGNBP2, GNAO1, H2AFZ, HSPB1, IL17RB, IL17RC, ILF2, PDCD6, PI3, POFUT2, RABGEF1, RBM4, SKA2, SLC38A2, SNRPA1, SPCS2, TAF1D, TNFSF10, ZNF302, ZNF333, ZNF419, ZNF624, ZNF677, ZNF720, LPA, B4GAT1, CDH6, CUTA, DMBT1, FCGBP, OSMR, SSC5D, TNXB, BMP4, DPP4, MYLK2, MYLK4, ADRB1, ALDH1A2, ANKRD55, CLU, CTDSPL, CTNNAL1, DHFR, DNAJB4, DPYD, FZD10, GAB1, HCRTR1, IL7, LRRC1, MYLIP, NR1H3, PCGF5, PLSCR4, RAB11FIP1, RPGR, RUNX1T1, SLC40A1, SLCO2A1, STAT1, SULT1B1, TBC1D8, TGM2, or WNT4, or the gene product is an RNA or polypeptide encoded by the one or more of aforementioned genes. In other embodiments, the gene target is a gene or gene product associated with a resistant response. Preferably, the gene is one or more of the following ARHGEF10L, SLC8A1, TREML1, PEAR1, SFN, CD14, AOAH, ASPRV1, EHD1, LCN2, ST3GAL6, MFSD1, PECAM1, ESAM, AFM, APCS, F12, GCA, GLOD4, GP5, HGFAC, IGF1, MMRN2, PF4V1, PFKL, POSTN, SAA4, TIMP3, YWHAG, ADAM12, ADAM19, GADD45G, FGF1, RASD1 or RGS16 or the gene product is an RNA or polypeptide encoded by one or more of the aforementioned genes.

[0008] In other embodiments of these aspects, the modulating agent or process increases the expression or activity of the gene target. Accordingly, the modulating agent is an activator of the gene target, an agonist antibody of the gene target, a cell expressing the gene target, a mimetic of the gene target, a derivative or recombinant form of the gene target, or a soluble form of the gene target. In still other embodiments, the modulating process is overexpression of the gene target or overexpression or depletion of a signal, signaling regulator, or receptor associated with the gene target. In other embodiments, the modulating agent or process decreases the expression or activity of the gene target. And in other embodiments, the modulating agent is an inhibitor of the gene target, an inhibiting or neutralizing antibody of the gene target, a moiety blocking a receptor associated with the gene target, or a RNAi molecule targeting the gene target. Typically, the modulating process is depletion of cells expressing the gene target, overexpression or depletion of a signal, signaling regulator, or receptor associated with the gene target, depletion of a ligand of the gene target, or genetic ablation of the gene target. Exemplary modulating agents include a protein, a peptide, a polynucleotide, a small molecule, or a chemical (e.g., a gliptin such as saxagliptin, ISA-2011B, or benzamil).

[0009] In some embodiments, the modulating agent is delivered orally, by injection, by a lipid-based carrier, or by a nanoparticle-type carrier. In other embodiments, the modulating agent is delivered by an expression vector or plasmid containing a gene insert that codes for the immunomodulant agent. In other embodiments, the modulating agent is associated with a gene editing technology.

[0010] In some embodiments, the inflammatory stimulus is a bacterial lipopolysaccharide (LPS).

[0011] In some embodiments, the disease of immune dysregulation is an inflammatory disease. Exemplary inflammatory diseases include sepsis, achalasia, acute or ischemic colitis, acute respiratory distress syndrome, allergy, allograft rejection, alveolitis, Alzheimer's disease, a neurological disease associated with amyloidosis, amebiasis, anaphylactic shock, angiitis, ankylosing spondylitis, appendicitis, arteritis, arthralgia, arthritides, asthma, atherosclerosis, Behcet's syndrome, Berger's disease, bronchiolitis, bronchitis, burns, cachexia, candidiasis, cerebral embolism, cerebral infarction, cholangitis, cholecystitis, chronic fatigue syndrome, celiac disease, congestive heart failure, Crohn's disease, cystic fibrosis, Dengue fever, dermatitis, dermatomyositis, disseminated bacteremia, diverticulitis, duodenal ulcers, emphysema, encephalitis, endocarditis, endotoxic shock, enteritis, eosinophilic granuloma, epididymitis, epiglottitis, fasciitis, filariasis, gastric ulcers, Goodpasture's syndrome, gout, graft-versus-host disease, granulomatosis, Guillan-Barre syndrome, hay fever, hepatitis, hepatitis B virus infection, hepatitis C virus infection, herpes infection, HIV infection, Hodgkin's disease, hydatid cysts, hyperpyrexia, immune complex disease, influenza, malaria, meningitis, multiple sclerosis, a multiple sclerosis-associated demyelination disease, myasthenia gravis, myocardial ischemia, myocarditis, neuralgia, neuritis, organ ischemia, organ necrosis, osteomyelitis, Paget's disease, pancreatitis, ulcerative pancreatitis, pseudomembranous colitis, pancreatitis, paralysis, peptic ulcers, periarteritis nodosa, pericarditis, periodontal disease, peritonitis, pharyngitis, pleurisy, pneumonitis, pneumonoultramicroscopicsilicovolcanokoniosis, prostatitis, pseudomembranous Reiter's syndrome, reperfusion injury, respiratory syncytial virus infection, rheumatic fever, rheumatoid arthritis, rhinitis, sarcoidosis, septic abortion, septicemia, sinusitis, forms of cancer having an inflammatory component, spinal cord injury, sunburn, synovitis, systemic lupus erythematosus, systemic lupus erythrocytosis, thrombophlebitis, thyroiditis, Type I diabetes, ulcerative colitis, urethritis, urticaria, uveitis, vaginitis, vasculitis, warts, wheals, or Whipple's disease.

[0012] In other embodiments, the inflammatory disease is preferably a dermatological disorder such as one or more of the following: atopic dermatitis, alopecia areata, Bulloid pemphigus, eczema, chronic eczema, dermatomyositis, erythema nodosum, epidermolysis bullosa, hydradenitis suppurativa, lichen planus, pemphigus vulgaris, psoriasis, pyoderma gangrenosum, scleroderma, or vitiligo.

[0013] Preferably, the inflammatory disease is sepsis.

[0014] Preferred gastrointestinal disorders include Crohns' disease and ulcerative colitis.

[0015] Preferred neurological disorders include multiple sclerosis.

[0016] Preferred musculoskeletal disorders include ankylosing spondylitis, juvenile idiopathic arthritis, polymyalgia rheumatica, psoriatic arthritis, rheumatoid arthritis, systemic lupus erythematosus.

[0017] Preferred respiratory disorders include asthma and sarcoidosis.

[0018] In still other embodiments, the disease of immune dysregulation is secondary induced inflammation (for example, the secondary induced inflammation is associated with a bacterial infection, a viral infection, a fungal infection, or a parasitic infection (including bacterial and viral pneumonia, as well as microbial infection in all locations, including meningitis, pyelonephritis, sinusitis, etc.)).

[0019] In other embodiments, the inflammatory disease is allograft rejection and wherein the composition further includes an immunosuppressant used to inhibit allograft rejection.

[0020] In still other embodiments, the inflammatory disease is a xenograft rejection and wherein the composition further includes an immunosuppressant used to treat xenograft rejection.

[0021] In some embodiments of the aforementioned aspects, the mammal has a cancer and the alteration of the expression or activity of the gene target increases an innate immune response of the mammal (e.g., a human) or subject.

[0022] The invention further includes methods of screening to identify therapeutic interventions for treating a disorder of immune dysregulation. Accordingly, in another aspect, the invention features a method for identifying one or more effective therapeutic intervention targets for a disease of immune dysregulation, the method including: (i) measuring a whole transcriptome gene expression profile in leukocytes from a whole blood sample of a mammal, wherein the mammal or the whole blood sample has been treated with a pro-inflammatory stimulus or has not been treated with an inflammatory stimulus and wherein the mammal has an in vivo innate immune response that is resistant or sensitive, and (ii) identifying the whole-transcriptome gene expression profile as associated with innate immune resistance or sensitivity based on the in vivo innate immune response of the mammal, wherein the gene expression profiles are associated with innate immune resistance or sensitivity and are potential therapeutic targets for diseases of innate immune dysregulation.

[0023] In still another aspect, the invention features a method for identifying a therapeutic intervention target for a disease of immune dysregulation, the method including: (a) determining a gene expression profile in a blood sample of a first mammal, wherein the first mammal has an in vivo innate immune response that is resistant, (b) determining a gene expression profile in a blood sample of a second mammal, wherein the second mammal has an in vivo innate immune response that is sensitive, (c) identifying a gene or gene target having differential expression between the first mammal and the second mammal, and (d) identifying the gene or gene target as associated with a resistant response or a sensitive response based on the differential expression, wherein a gene or gene target associated with a resistant response or a sensitive response is identified as a therapeutic intervention target for a disease of immune dysregulation.

[0024] In either of these aspects, the first mammal and the second mammal, or the whole blood samples thereof, have not been treated with an inflammatory stimulus.

[0025] In some embodiments, the first mammal and the second mammal, or the whole blood samples thereof, have been treated with an inflammatory stimulus and the differential expression is differential expression following exposure to the inflammatory stimulus.

[0026] In some embodiments, the inflammatory stimulus is a toxin such as bacterial lipopolysaccharide (LPS) or a viral mimic (e.g., polyinosinic:polycytidylic acid (Poly(I:C))).

[0027] In other embodiments, the first mammal is one or more of baboon, rhesus monkey (rhesus macaque), rat, or mouse.

[0028] In still other embodiments, the second mammal is one or more of human, chimp, rabbit, sheep, cow, or pig.

[0029] The invention still further provides methods for assessing an immune response. Thus, in another aspect, the invention features a method for assessing an immune response of a mammal, the method including determining the expression of a gene target associated with a sensitive response or a resistant response to an inflammatory stimulus in the mammal, wherein the expression of the gene target identifies the immune response of the mammal as a sensitive response or a resistant response.

[0030] In some embodiments, the gene target is a gene or gene product associated with a resistant response. In some embodiments, the gene is one or more of ARHGEF10L, SLC8A1, TREML1, PEAR1, SFN, CD14, AOAH, ASPRV1, EHD1, LCN2, ST3GAL6, MFSD1, PECAM1, ESAM, AFM, APCS, F12, GCA, GLOD4, GP5, HGFAC, IGF1, MMRN2, PF4V1, PFKL, POSTN, SAA4, TIMP3, YWHAG, ADAM12, ADAM19, GADD45G, FGF1, RASD1 or RGS16, or the gene product is an RNA or polypeptide encoded by one or more of the aforementioned genes.

[0031] In some embodiments, the expression level of one or more (e.g., 1, 2, 3, 4, 5, 6, 7, 8, 9, 10, 11, 12, 13, 14, 15, 16, 17, 18, 19, 20, 21, 22, 23, 24, 25, 26, 27, 28, 29, 30, 31, 32, 33, 34, or 35) of ARHGEF10L, SLC8A1, TREML1, PEAR1, SFN, CD14, AOAH, ASPRV1, EHD1, LCN2, ST3GAL6, MFSD1, PECAM1, ESAM, AFM, APCS, F12, GCA, GLOD4, GP5, HGFAC, IGF1, MMRN2, PF4V1, PFKL, POSTN, SAA4, TIMP3, YWHAG, ADAM12, ADAM19, GADD45G, FGF1, RASD1 or RGS16 is determined. In other embodiments, the expression level of one or more (e.g., 1, 2, 3, 4, 5, 6, 7, 8, 9, 10, 11, 12, 13, 14, 15, 16, or 17) of ARHGEF10L, SLC8A1, TREML1, PEAR1, SFN, CD14, AOAH, ASPRV1, EHD1, LCN2, ST3GAL6, MFSD1, PECAM1, ESAM, AFM, APCS, or F12 is determined.

[0032] In still other embodiments, the gene target is a gene or gene product associated with a sensitive response. For example, the gene target is gene is one or more of EMC9, IRAK4, NFATC2, PLA2G10, SARM1, PIP5K1A, PDIA4, ARPC4, BNIP3, CCDC65, CENPH, CHPT1, COMMD3, DR1, FGD1, FIGNL1, GGNBP2, GNAO1, H2AFZ, HSPB1, IL17RB, IL17RC, ILF2, PDCD6, PI3, POFUT2, RABGEF1, RBM4, SKA2, SLC38A2, SNRPA1, SPCS2, TAF1D, TNFSF10, ZNF302, ZNF333, ZNF419, ZNF624, ZNF677, ZNF720, LPA, B4GAT1, CDH6, CUTA, DMBT1, FCGBP, OSMR, SSC5D, TNXB, BMP4, DPP4, MYLK2, MYLK4, ADRB1, ALDH1A2, ANKRD55, CLU, CTDSPL, CTNNAL1, DHFR, DNAJB4, DPYD, FZD10, GAB1, HCRTR1, IL7, LRRC1, MYLIP, NR1H3, PCGF5, PLSCR4, RAB11FIP1, RPGR, RUNX1T1, SLC40A1, SLCO2A1, STAT1, SULT1B1, TBC1 D8, TGM2 or WNT4, or the gene product is an RNA or polypeptide encoded by one or more of the aforementioned genes.

[0033] In some embodiments, the expression level of one or more (e.g., 1, 2, 3, 4, 5, 6, 7, 8, 9, 10, 11, 12, 13, 14, 15, 16, 17, 18, 19, 20, 21, 22, 23, 24, 25, 26, 27, 28, 29, 30, 31, 32, 33, 34, 35, 36, 37, 38, 39, 40, 41, 42, 43, 44, 45, 46, 47, 48, 49, 50, 51, 52, 53, 54, 55, 56, 57, 58, 59, 60, 61, 62, 63, 64, 65, 66, 67, 68, 69, 70, 71, 72, 73, 74, 75, 76, 77, 78, 79, 80 or 81) of EMC9, IRAK4, NFATC2, PLA2G10, SARM1, PIP5K1A, PDIA4, ARPC4, BNIP3, CCDC65, CENPH, CHPT1, COMMD3, DR1, FGD1, FIGNL1, GGNBP2, GNAO1, H2AFZ, HSPB1, IL17RB, IL17RC, ILF2, PDCD6, PI3, POFUT2, RABGEF1, RBM4, SKA2, SLC38A2, SNRPA1, SPCS2, TAF1D, TNFSF10, ZNF302, ZNF333, ZNF419, ZNF624, ZNF677, ZNF720, LPA, B4GAT1, CDH6, CUTA, DMBT1, FCGBP, OSMR, SSC5D, TNXB, BMP4, DPP4, MYLK2, MYLK4, ADRB1, ALDH1A2, ANKRD55, CLU, CTDSPL, CTNNAL1, DHFR, DNAJB4, DPYD, FZD10, GAB1, HCRTR1, IL7, LRRC1, MYLIP, NR1H3, PCGF5, PLSCR4, RAB11FIP1, RPGR, RUNX1T1, SLC40A1, SLCO2A1, STAT1, SULT1B1, TBC1 D8, TGM2 or WNT4 is determined. In other embodiments, the expression level of one or more (e.g., 1, 2, 3, 4, 5, 6, 7, 8, 9, 10, 11, 12, 13, 14, 15, 16, 17, 18, 19, 20, 21, 22, 23, 24, 25, 26, 27, 28, 29, 30, 31, 32, 33, 34, 35, 36, 37, 38, 39, 40, 41, 42, 43, 44, 45, or 46) of EMC9, IRAK4, NFATC2, PLA2G10, SARM1, PIP5K1A, PDIA4, ARPC4, BNIP3, CCDC65, CENPH, CHPT1, COMMD3, DR1, FGD1, FIGNL1, GGNBP2, GNAO1, H2AFZ, HSPB1, IL17RB, IL17RC, ILF2, PDCD6, PI3, POFUT2, RABGEF1, RBM4, SKA2, SLC38A2, SNRPA1, SPCS2, TAF1 D, TNFSF10, ZNF302, ZNF333, ZNF419, ZNF624, ZNF677, ZNF720, LPA, B4GAT1, CDH6, CUTA, DMBT1, or FCGBP is determined. And still in other embodiments, the expression level of one or more (e.g., 1, 2, 3, 4, 5, 6, 7, 8, 9, 10, 11, 12, 13, 14, 15, 16, 17, 18, 19, or 20) of EMC9, IRAK4, NFATC2, PLA2G10, SARM1, PIP5K1A, PDIA4, ARPC4, BNIP3, CCDC65, CENPH, CHPT1, COMMD3, DR1, FGD1, FIGNL1, GGNBP2, GNAO1, H2AFZ, or HSPB1 is determined.

[0034] Typically, the expression level is an mRNA expression level which is determined. For example, the mRNA expression level is determined by PCR, RT-PCR, RNA-seq, gene expression profiling, serial analysis of gene expression, or microarray analysis. Preferably, the mRNA expression level is determined by RNA-seq.

[0035] In other embodiments, the expression level of a protein is determined. For example, the protein expression is determined by western blot, immunohistochemistry, or mass spectrometry.

[0036] In other aspects, the invention features methods of treating a disease of immune dysregulation as is disclosed herein. Thus, in another aspect, the invention features a method for treating a disease of immune dysregulation in a subject, the method including administering to the subject a therapeutically effective amount of a gliptin, benzamil, and/or ISA2011B. In some embodiments, the gliptin is vildagliptin, saxagliptin, alogliptin, linagliptin, sitagliptin, gemigliptin, anagliptin, and teneligliptin.

[0037] It is to be understood that aspects and embodiments of the invention described herein include “comprising,” “consisting,” and “consisting essentially of” aspects and embodiments. As used herein, the singular form “a,” “an,” and “the” includes plural references unless indicated otherwise.

[0038] As used herein, the term “treatment” (and variations thereof, such as “treat” or “treating”) refers to clinical intervention in an attempt to alter the natural course of the individual being treated, and can be performed either for prophylaxis or during the course of clinical pathology. Desirable effects of treatment include, but are not limited to, preventing occurrence or recurrence of disease of immune dysregulation, alleviation of symptoms of such diseases, diminishment of any direct or indirect pathological consequences of the diseases, as well as altering an immune response. Additionally, treatment refers to clinical intervention relating to any of the diseases or conditions described herein.

[0039] As used herein, by the term “administering” is meant a method of giving a dosage of a compound to a subject. The compositions utilized in the methods described herein can be administered, for example, intravitreally (e.g., by intravitreal injection), by eye drop, intramuscularly, intravenously, intradermally, percutaneously, intraarterially, intraperitoneally, intralesionally, intracranially, intraarticularly, intraprostatically, intrapleurally, intratracheally, intrathecally, intranasally, intravaginally, intrarectally, topically, intratumorally, peritoneally, subcutaneously, subconjunctivally, intravesicularly, mucosally, intrapericardially, intraumbilically, intraocularly, intraorbitally, orally, topically, transdermally, by inhalation, by injection, by implantation, by infusion, by continuous infusion, by localized perfusion bathing target cells directly, by catheter, by lavage, in cremes, or in lipid compositions. The compositions utilized in the methods described herein can also be administered systemically or locally. For topical administration, a dosage is administered in a lotion, a cream, an ointment, or a gel. The method of administration can vary depending on various factors (e.g., the compound or composition being administered and the severity of the condition, disease, or disorder of immune dysregulation being treated).

[0040] A subject to be treated according to this invention is a mammal. The mammal could be, for example, a primate (e.g., a human), a rodent (e.g., a rat or a mouse), or a mammal of another species (e.g., farm or other domesticated animals) as is discussed herein. In each one of the above methods, the mammal may be one that suffers from an immunological disorder such as a disease of immune dysregulation.

[0041] A mammal “in need” of treatment can include, but are not limited to, mammals that have immunological disorders, mammals that have had immunological disorders, or mammals with symptoms of immunological disorders. Exemplary disorders are disclosed herein.

[0042] An “effective amount” of an agent, e.g., a pharmaceutical formulation, refers to an amount effective, at dosages and for periods of time necessary, to achieve the desired therapeutic or prophylactic result or a specifically state purpose. An “effective amount” can be determined empirically and by known methods relating to the stated purpose.

[0043] The terms “level of expression” or “expression level” in general are used interchangeably and generally refer to the amount of a target gene (or a biomarker) in a biological sample. “Expression” generally refers to the process by which information (e.g., gene-encoded and/or epigenetic information) is converted into the structures present and operating in the cell. Therefore, as used herein, “expression” may refer to transcription into a polynucleotide, translation into a polypeptide, or even polynucleotide and/or polypeptide modifications (e.g., posttranslational modification of a polypeptide). Fragments of the transcribed polynucleotide, the translated polypeptide, or polynucleotide and/or polypeptide modifications (e.g., post-translational modification of a polypeptide) shall also be regarded as expressed whether they originate from a transcript generated by alternative splicing or a degraded transcript, or from a post-translational processing of the polypeptide, e.g., by proteolysis. “Expressed genes” include those that are transcribed into a polynucleotide as mRNA and then translated into a polypeptide, and also those that are transcribed into RNA but not translated into a polypeptide (for example, transfer and ribosomal RNAs).

[0044] As used herein, the terms “disease of immune dysregulation” and “disease of innate immune dysregulation” refer to any disease, disorder, or condition associated with dysregulation of an immune response of a subject (e.g., a mammal). The dysregulation may be inappropriate immune activity (e.g., an overactive immune response) or lack of activity (e.g., an underactive immune response). Diseases of immune dysregulation include inflammatory diseases such as those diseases and conditions described herein.

[0045] As used herein, the term “secondary induced inflammation” refers to inflammation caused by an infection such as that caused by virtually any microbial infection or by non-infectious causes of inflammation. Such inflammation, for example, is present during infections involving viral or bacterial pneumonia, as well as in meningitis, pyelonephritis, and sinusitis. Some examples of non-infectious causes of secondary inflammation include pancreatitis, burn or trauma injury.

[0046] As used herein, the term “inflammatory stimulus” refers to a stimulus that may provoke an immune response in a subject (e.g., a mammal) or a sample (e.g., a cultured cell (e.g., a cultured endothelial cell) or a blood sample). In some examples, the inflammatory stimulus is an endotoxin (e.g., a bacterial lipopolysaccharide (LPS)) or a viral mimic (e.g., polyinosinic:polycytidylic acid (Poly(I:C)). In some embodiments, a microbial endotoxin provokes the immune response.

[0047] By a “toxin” is meant a compound produced by or part of an organism (e.g., a bacterium or another microbe) that results in an inflammatory response in a mammal or a subject. In one example, the toxin is a component of a bacterium for example, a gram-negative bacterium (in such cases, the toxin is a bacterial toxin. In some instances, the bacterial toxin may be secreted. Such secreted toxins include anthrax and pertussis toxins. In other examples, the toxin is lipopolysaccharide (LPS). In still other examples, the toxin is a viral or parasitic toxin.

[0048] As used herein, the terms “sensitive”, “sensitive response”, “innate sensitivity”, and “innate immune sensitivity” refer to an immune response of a species, subject, or sample (e.g., a cell culture or a blood sample) to an inflammatory stimulus (e.g., endotoxin challenge) that is sensitive relative to another group, e.g., has relatively high secondary inflammation following exposure to the inflammatory stimulus or is not able to tolerate more than a relatively low dose of the inflammatory stimulus before experiencing an adverse event, e.g., death.

[0049] As used herein, the terms “tolerant”, “resistant”, “resistant response”, “innate resistance”, and “innate immune resistance” refer to an immune response of a species, subject, or sample (e.g., a cell culture or a whole blood sample) to an inflammatory stimulus (e.g., endotoxin challenge) that is resistant or tolerant relative to another group, e.g., has relatively low secondary inflammation following the inflammatory stimulus or is able to tolerate a relatively high dose of the inflammatory stimulus before experiencing an adverse event, e.g., death.

[0050] As used herein, the term “gene target” refers to a gene or a gene product (e.g., an RNA, a polypeptide, or a protein) that is associated with a sensitive or a resistant response to an inflammatory stimulus and is the target of a modulating agent or a modulating process. Exemplary gene targets are described throughout the application. Preferred sensitive and resistant gene targets are respectively listed in Tables 6 and 7 herein.

[0051] A “patient” or “subject” herein refers to any single animal (including, e.g., a mammal, such as a dog, a cat, a horse, a rabbit, a zoo animal, a cow, a pig, a sheep, a non-human primate, and a human), such as a human, eligible for treatment who is experiencing or has experienced one or more signs, symptoms, or other indicators of a disease of immune dysregulation. Intended to be included as a patient are any patients involved in clinical research trials not showing any clinical sign of disease, patients involved in epidemiological studies, or patients once used as controls.

[0052] The term “modulating agent”, as used herein, refers to any moiety that can modulate the expression or activity of a gene target. In some examples, the modulating agent increases the expression or activity of a gene target. Exemplary modulating agents that may increase the expression or activity of a gene target (e.g., 5%, 10%, 20%, 30%, 40%, or 50% or greater relative to the reference level (e.g., the mean level) of a control) include, but are not limited to an activator of the gene target, an agonist antibody or antibody fragment of the gene target, a cell expressing the gene target, a mimetic of the gene target (including a mimetic that alters the expression or activity of the gene target), a derivative or recombinant form of the gene target, a soluble form of the gene target, or a moiety that alters the activity of an endogenous regulator of the gene target. In other examples, the modulating agent decreases the expression or activity of a gene target. Exemplary modulating agents that may decrease the expression or activity of a gene target (e.g., 5%, 10%, 20%, 30%, 40%, or 50% or greater relative to the reference level (e.g., the mean level) of a control) include, but are not limited to an inhibitor of the gene target, an inhibiting or neutralizing antibody of the gene target, a moiety blocking a receptor associated with the gene target, a moiety that alters the activity of an endogenous regulator of the gene target, or a RNAi molecule targeting the gene target.

[0053] The term “modulating process”, as used herein, refers to any process that can modulate the expression or activity of a gene target. In some examples, the modulating process increases the expression or activity of a gene target. Exemplary modulating processes that may increase the expression or activity of a gene target include, but are not limited to overexpression of the gene target and overexpression or depletion of a signal, signaling regulator, or receptor associated with the gene target. In other examples, the modulating process decreases the expression or activity of a gene target. Exemplary modulating processes that may decrease the expression or activity of a gene target include, but are not limited to depletion of cells expressing the gene target, overexpression or depletion of a signal, signaling regulator, or receptor associated with the gene target, depletion of a ligand of the gene target, or genetic ablation of the gene target.

[0054] As used herein, the term “altering an immune response” refers to a process in which a modulating agent or modulating process alters the expression or activity of a gene target related to inflammation in a subject (e.g., a mammal) or a sample (e.g., a cell culture or a blood sample) relative to subject or sample that has not been treated with the modulating agent. In some examples, the expression or activity of the gene target in the treated subject or sample is modified to resemble the expression or activity of the gene target in a species, subject, or sample having a resistant immune response, thus altering the immune response of the treated subject or sample to be more resistant. In other examples, the expression or activity of the gene target in the treated subject or sample is modified to resemble the expression or activity of the gene target in a species, subject, or sample having a sensitive immune response, thus altering the immune response of the treated subject or sample to be more sensitive.

[0055] Some embodiments of the technology and methodologies described herein can defined according to any of the following numbered paragraphs.

[0056] Treatment of a Disease of Immune Dysregulation
[0057] 1. A method for treating the onset of a disease of immune dysregulation in a mammal, the method comprising administering to the mammal a therapeutically effective amount of a modulating agent or subjecting the mammal to a modulating process, wherein the modulating agent or process alters the expression or activity of a gene target associated with a sensitive response or a resistant response to an inflammatory stimulus.
[0058] 2. A method for altering an immune response in a mammal, the method comprising administering to the mammal a therapeutically effective amount of a modulating agent or subjecting the mammal to a modulating process, wherein the modulating agent or process alters the expression or activity of a gene target associated with a sensitive response or a resistant response to an inflammatory stimulus.
[0059] 3. The method of paragraph 1 or 2, wherein the gene target is a gene or gene product associated with a sensitive response (see, for example, Table 6).
[0060] 4. The method of paragraph 3, wherein the gene is one or more of the following EMC9, IRAK4, NFATC2, PLA2G10, SARM1, PIP5K1A, PDIA4, ARPC4, BNIP3, CCDC65, CENPH, CHPT1, COMMD3, DR1, FGD1, FIGNL1, GGNBP2, GNAO1, H2AFZ, HSPB1, IL17RB, IL17RC, ILF2, PDCD6, PI3, POFUT2, RABGEF1, RBM4, SKA2, SLC38A2, SNRPA1, SPCS2, TAF1D, TNFSF10, ZNF302, ZNF333, ZNF419, ZNF624, ZNF677, ZNF720, LPA, B4GAT1, CDH6, CUTA, DMBT1, FCGBP, OSMR, SSC5D, TNXB, BMP4, DPP4, MYLK2, MYLK4, ADRB1, ALDH1A2, ANKRD55, CLU, CTDSPL, CTNNAL1, DHFR, DNAJB4, DPYD, FZD10, GAB1, HCRTR1, IL7, LRRC1, MYLIP, NR1H3, PCGF5, PLSCR4, RAB11FIP1, RPGR, RUNX1T1, SLC40A1, SLCO2A1, STAT1, SULT1B1, TBC1D8, TGM2, or WNT4, or the gene product is an RNA or polypeptide encoded by the one or more of aforementioned genes.
[0061] 5. The method of paragraph 1 or 2, wherein the gene target is a gene or gene product associated with a resistant response (see, for example, Table 7).
[0062] 6. The method of paragraph 5, wherein the gene is one or more of the following ARHGEF10L, SLC8A1, TREML1, PEAR1, SFN, CD14, AOAH, ASPRV1, EHD1, LCN2, ST3GAL6, MFSD1, PECAM1, ESAM, AFM, APCS, F12, GCA, GLOD4, GP5, HGFAC, IGF1, MMRN2, PF4V1, PFKL, POSTN, SAA4, TIMP3, YWHAG, ADAM12, ADAM19, GADD45G, FGF1, RASD1 or RGS16 or the gene product is an RNA or polypeptide encoded by one or more of the aforementioned genes.
[0063] 7. The method of any one of paragraphs 1-6, wherein the modulating agent or process increases the expression or activity of the gene target.
[0064] 8. The method of paragraph 7, wherein the modulating agent is an activator of the gene target, an agonist antibody of the gene target, a cell expressing the gene target, a mimetic of the gene target, a derivative or recombinant form of the gene target, or a soluble form of the gene target.
[0065] 9. The method of paragraph 7, wherein the modulating process is overexpression of the gene target or overexpression or depletion of a signal, signaling regulator, or receptor associated with the gene target.
[0066] 10. The method of any one of paragraphs 1-6, wherein the modulating agent or process decreases the expression or activity of the gene target.
[0067] 11. The method of paragraph 10, wherein the modulating agent is an inhibitor of the gene target, an inhibiting or neutralizing antibody of the gene target, a moiety blocking a receptor associated with the gene target, or a RNAi molecule targeting the gene target.
[0068] 12. The method of paragraph 10, wherein the modulating process is depletion of cells expressing the gene target, overexpression or depletion of a signal, signaling regulator, or receptor associated with the gene target, depletion of a ligand of the gene target, or genetic ablation of the gene target.
[0069] 13. The method of any one of paragraphs 1-12, wherein the modulating agent is a protein, a peptide, a polynucleotide, a small molecule, or a chemical (e.g., a gliptin such as saxagliptin, ISA-2011B, or benzamil).
[0070] 14. The method of any one of paragraphs 1-13, wherein the modulating agent is delivered orally, by injection, by a lipid-based carrier, or by a nanoparticle-type carrier.
[0071] 15. The method of any one of paragraphs 1-13, wherein the modulating agent is delivered by an expression vector or plasmid containing a gene insert that codes for the immunomodulant agent.
[0072] 16. The method of any one of paragraphs 1-13, wherein the modulating agent is associated with a gene editing technology.
[0073] 17. The method of any one of paragraphs 1-16, wherein the inflammatory stimulus is a bacterial lipopolysaccharide (LPS).
[0074] 18. The method of any one of paragraphs 1 and 3-17, wherein the disease of immune dysregulation is an inflammatory disease.
[0075] 19. The method of paragraph 18, wherein the inflammatory disease is sepsis, achalasia, acute or ischemic colitis, acute respiratory distress syndrome, allergy, allograft rejection, alveolitis, Alzheimer's disease, a neurological disease associated with amyloidosis, amebiasis, anaphylactic shock, angiitis, ankylosing spondylitis, appendicitis, arteritis, arthralgia, arthritides, asthma, atherosclerosis, Behcet's syndrome, Berger's disease, bronchiolitis, bronchitis, burns, cachexia, candidiasis, cerebral embolism, cerebral infarction, cholangitis, cholecystitis, chronic fatigue syndrome, celiac disease, congestive heart failure, Crohn's disease, cystic fibrosis, Dengue fever, dermatitis, dermatomyositis, disseminated bacteremia, diverticulitis, duodenal ulcers, emphysema, encephalitis, endocarditis, endotoxic shock, enteritis, eosinophilic granuloma, epididymitis, epiglottitis, fasciitis, filariasis, gastric ulcers, Goodpasture's syndrome, gout, graft-versus-host disease, granulomatosis, Guillan-Barre syndrome, hay fever, hepatitis, hepatitis B virus infection, hepatitis C virus infection, herpes infection, HIV infection, Hodgkin's disease, hydatid cysts, hyperpyrexia, immune complex disease, influenza, malaria, meningitis, multiple sclerosis, a multiple sclerosis-associated demyelination disease, myasthenia gravis, myocardial ischemia, myocarditis, neuralgia, neuritis, organ ischemia, organ necrosis, osteomyelitis, Paget's disease, pancreatitis, ulcerative pancreatitis, pseudomembranous colitis, pancreatitis, paralysis, peptic ulcers, periarteritis nodosa, pericarditis, periodontal disease, peritonitis, pharyngitis, pleurisy, pneumonitis, pneumonoultramicroscopicsilicovolcanokoniosis, prostatitis, pseudomembranous Reiter's syndrome, reperfusion injury, respiratory syncytial virus infection, rheumatic fever, rheumatoid arthritis, rhinitis, sarcoidosis, septic abortion, septicemia, sinusitis, forms of cancer having an inflammatory component, spinal cord injury, sunburn, synovitis, systemic lupus erythematosus, systemic lupus erythrocytosis, thrombophlebitis, thyroiditis, Type I diabetes, ulcerative colitis, urethritis, urticaria, uveitis, vaginitis, vasculitis, warts, wheals, or Whipple's disease.
[0076] 20. The method of paragraph 19, wherein the inflammatory disease is sepsis.
[0077] 21. The method of any one of paragraphs 1 and 3-17, wherein the disease of immune dysregulation is secondary induced inflammation.
[0078] 22. The method of paragraph 21, wherein the secondary induced inflammation is associated with a bacterial infection, a viral infection, a fungal infection, or a parasitic infection (including bacterial and viral pneumonia, as well as microbial infection in all locations, including meningitis, pyelonephritis, sinusitis, etc.)
[0079] 23. The method of paragraph 19, wherein the inflammatory disease is allograft rejection and wherein the composition further comprises an immunosuppressant used to inhibit allograft rejection.
[0080] 24. The method of paragraph 19, wherein the inflammatory disease is a xenograft rejection and wherein the composition further comprises an immunosuppressant used to treat xenograft rejection.
[0081] 25. The method of paragraph 2, where the mammal has a cancer and the alteration of the expression or activity of the gene target increases an innate immune response of the mammal.
[0082] 26. The method of any one of paragraphs 1-25, wherein the mammal is a human.

[0083] Screening for Therapeutic Intervention Targets
[0084] 1. A method for identifying one or more effective therapeutic intervention targets for a disease of immune dysregulation, the method comprising:
   [0085] (i) measuring a whole transcriptome gene expression profile in leukocytes from a whole blood sample of a mammal, wherein the mammal or the whole blood sample has been treated with a pro-inflammatory stimulus or has not been treated with an inflammatory stimulus and wherein the mammal has an in vivo innate immune response that is resistant or sensitive, and
   [0086] (ii) identifying the whole-transcriptome gene expression profile as associated with innate immune resistance or sensitivity based on the in vivo innate immune response of the mammal,
      wherein the gene expression profiles are associated with innate immune resistance or sensitivity and are potential therapeutic targets for diseases of innate immune dysregulation.
[0087] 2. A method for identifying a therapeutic intervention target for a disease of immune dysregulation, the method comprising:
   [0088] (a) determining a gene expression profile in a blood sample of a first mammal, wherein the first mammal has an in vivo innate immune response that is resistant,
   [0089] (b) determining a gene expression profile in a blood sample of a second mammal, wherein the second mammal has an in vivo innate immune response that is sensitive,
   [0090] (c) identifying a gene or gene target having differential expression between the first mammal and the second mammal, and
   [0091] (d) identifying said gene or gene target as associated with a resistant response or a sensitive response based on said differential expression, wherein a gene or gene target associated with a resistant response or a sensitive response is identified as a therapeutic intervention target for a disease of immune dysregulation.
[0092] 3. The method of paragraph 2, wherein the first mammal and the second mammal, or the whole blood samples thereof, have not been treated with an inflammatory stimulus.
[0093] 4. The method of paragraph 2, wherein the first mammal and the second mammal, or the whole blood samples thereof, have been treated with an inflammatory stimulus and the differential expression is differential expression following exposure to the inflammatory stimulus.
[0094] 5. The method of paragraph 4, wherein the inflammatory stimulus is a toxin such as bacterial lipopolysaccharide (LPS) or a viral mimic.
[0095] 6. The method of paragraph 4, wherein the viral mimic is polyinosinic:polycytidylic acid (Poly(I:C)).
[0096] 7. The method of paragraph 2, wherein the first mammal is one or more of baboon, rhesus monkey (rhesus macaque), rat, or mouse.
[0097] 8. The method of paragraph 2, wherein the second mammal is one or more of human, chimp, rabbit, sheep, cow, or pig.

[0098] Biomarkers of Sensitive or Resistant Responses
[0099] 1. A method for assessing an immune response of a mammal, the method comprising determining the expression of a gene target associated with a sensitive response or a resistant response to an inflammatory stimulus in the mammal, wherein the expression of the gene target identifies the immune response of the mammal as a sensitive response or a resistant response.
[0100] 2. The method of paragraph 1, wherein the gene target is a gene or gene product associated with a resistant response.
[0101] 3. The method of paragraph 2, wherein the gene is one or more of ARHGEF10L, SLC8A1, TREML1, PEAR1, SFN, CD14, AOAH, ASPRV1, EHD1, LCN2, ST3GAL6, MFSD1, PECAM1, ESAM, AFM, APCS, F12, GCA, GLOD4, GP5, HGFAC, IGF1, MMRN2, PF4V1, PFKL, POSTN, SAA4, TIMP3, YWHAG, ADAM12, ADAM19, GADD45G, FGF1, RASD1 or RGS16, or the gene product is an RNA or polypeptide encoded by one or more of the aforementioned genes.
[0102] 4. The method of paragraph 3, wherein the expression level of one or more (e.g., 1, 2, 3, 4, 5, 6, 7, 8, 9, 10, 11, 12, 13, 14, 15, 16, 17, 18, 19, 20, 21, 22, 23, 24, 25, 26, 27, 28, 29, 30, 31, 32, 33, 34, or 35) of ARHGEF10L, SLC8A1, TREML1, PEAR1, SFN, CD14, AOAH, ASPRV1, EHD1, LCN2, ST3GAL6, MFSD1, PECAM1, ESAM, AFM, APCS, F12, GCA, GLOD4, GP5, HGFAC, IGF1, MMRN2, PF4V1, PFKL, POSTN, SAA4, TIMP3, YWHAG, ADAM12, ADAM19, GADD45G, FGF1, RASD1 or RGS16 is determined.
[0103] 5. The method of paragraph 3, wherein the expression level of one or more (e.g., 1, 2, 3, 4, 5, 6, 7, 8, 9, 10, 11, 12, 13, 14, 15, 16, or 17) of ARHGEF10L, SLC8A1, TREML1, PEAR1, SFN, CD14, AOAH, ASPRV1, EHD1, LCN2, ST3GAL6, MFSD1, PECAM1, ESAM, AFM, APCS, or F12 is determined.
[0104] 6. The method of paragraph 1, wherein the gene target is a gene or gene product associated with a sensitive response.
[0105] 7. The method of paragraph 6, wherein the gene target is gene is one or more of EMC9, IRAK4, NFATC2, PLA2G10, SARM1, PIP5K1A, PDIA4, ARPC4, BNIP3, CCDC65, CENPH, CHPT1, COMMD3, DR1, FGD1, FIGNL1, GGNBP2, GNAO1, H2AFZ, HSPB1, IL17RB, IL17RC, ILF2, PDCD6, PI3, POFUT2, RABGEF1, RBM4, SKA2, SLC38A2, SNRPA1, SPCS2, TAF1D, TNFSF10, ZNF302, ZNF333, ZNF419, ZNF624, ZNF677, ZNF720, LPA, B4GAT1, CDH6, CUTA, DMBT1, FCGBP, OSMR, SSC5D, TNXB, BMP4, DPP4, MYLK2, MYLK4, ADRB1, ALDH1A2, ANKRD55, CLU, CTDSPL, CTNNAL1, DHFR, DNAJB4, DPYD, FZD10, GAB1, HCRTR1, IL7, LRRC1, MYLIP, NR1H3, PCGF5, PLSCR4, RAB11FIP1, RPGR, RUNX1T1, SLC40A1, SLCO2A1, STAT1, SULT1B1, TBC1D8, TGM2 or WNT4, or the gene product is an RNA or polypeptide encoded by one or more of the aforementioned genes.
[0106] 8. The method of paragraph 7, wherein the expression level of one or more (e.g., 1, 2, 3, 4, 5, 6, 7, 8, 9, 10, 11, 12, 13, 14, 15, 16, 17, 18, 19, 20, 21, 22, 23, 24, 25, 26, 27, 28, 29, 30, 31, 32, 33, 34, 35, 36, 37, 38, 39, 40, 41, 42, 43, 44, 45, 46, 47, 48, 49, 50, 51, 52, 53, 54, 55, 56, 57, 58, 59, 60, 61, 62, 63, 64, 65, 66, 67, 68, 69, 70, 71, 72, 73, 74, 75, 76, 77, 78, 79, 80 or 81) of EMC9, IRAK4, NFATC2, PLA2G10, SARM1, PIP5K1A, PDIA4, ARPC4, BNIP3, CCDC65, CENPH, CHPT1, COMMD3, DR1, FGD1, FIGNL1, GGNBP2, GNAO1, H2AFZ, HSPB1, IL17RB, IL17RC, ILF2, PDCD6, PI3, POFUT2, RABGEF1, RBM4, SKA2, SLC38A2, SNRPA1, SPCS2, TAF1D, TNFSF10, ZNF302, ZNF333, ZNF419, ZNF624, ZNF677, ZNF720, LPA, B4GAT1, CDH6, CUTA, DMBT1, FCGBP, OSMR, SSC5D, TNXB, BMP4, DPP4, MYLK2, MYLK4, ADRB1, ALDH1A2, ANKRD55, CLU, CTDSPL, CTNNAL1, DHFR, DNAJB4, DPYD, FZD10, GAB1, HCRTR1, IL7, LRRC1, MYLIP, NR1H3, PCGF5, PLSCR4, RAB11FIP1, RPGR, RUNX1T1, SLC40A1, SLCO2A1, STAT1, SULT1B1, TBC1D8, TGM2 or WNT4 is determined.
[0107] 8. The method of paragraph 7, wherein the expression level of one or more (e.g., 1, 2, 3, 4, 5, 6, 7, 8, 9, 10, 11, 12, 13, 14, 15, 16, 17, 18, 19, 20, 21, 22, 23, 24, 25, 26, 27, 28, 29, 30, 31, 32, 33, 34, 35, 36, 37, 38, 39, 40, 41, 42, 43, 44, 45, or 46) of EMC9, IRAK4, NFATC2, PLA2G10, SARM1, PIP5K1A, PDIA4, ARPC4, BNIP3, CCDC65, CENPH, CHPT1, COMMD3, DR1, FGD1, FIGNL1, GGNBP2, GNAO1, H2AFZ, HSPB1, IL17RB, IL17RC, ILF2, PDCD6, PI3, POFUT2, RABGEF1, RBM4, SKA2, SLC38A2, SNRPA1, SPCS2, TAF1D, TNFSF10, ZNF302, ZNF333, ZNF419, ZNF624, ZNF677, ZNF720, LPA, B4GAT1, CDH6, CUTA, DMBT1, or FCGBP is determined.
[0108] 9. The method of paragraph 7, wherein the expression level of one or more (e.g., 1, 2, 3, 4, 5, 6, 7, 8, 9, 10, 11, 12, 13, 14, 15, 16, 17, 18, 19, or 20) of EMC9, IRAK4, NFATC2, PLA2G10, SARM1, PIP5K1A, PDIA4, ARPC4, BNIP3, CCDC65, CENPH, CHPT1, COMMD3, DR1, FGD1, FIGNL1, GGNBP2, GNAO1, H2AFZ, or HSPB1 is determined.
[0109] 10. The method of paragraph 1, wherein the expression level is an mRNA expression level.
[0110] 11. The method of paragraph 10, wherein the mRNA expression level is determined by PCR, RT-PCR, RNA-seq, gene expression profiling, serial analysis of gene expression, or microarray analysis.
[0111] 12. The method of paragraph 11, wherein the mRNA expression level is determined by RNA-seq.
[0112] 13. The method of paragraph 1, wherein the expression level is a protein expression level.
[0113] 14. The method of paragraph 13, wherein the protein expression is determined by western blot, immunohistochemistry, or mass spectrometry.

[0114] Use of Targets for Treating Immune Dysregulation (e.g., Use of EMC9)
[0115] 1. A method for treating the onset of a disease of immune dysregulation in a mammal, the method comprising administering to the mammal a therapeutically effective amount of a modulating agent or subjecting the mammal to a modulating process, wherein the modulating agent or process alters the expression or activity of EMC9 to an inflammatory stimulus.
[0116] 2. A method for altering an immune response in a mammal, the method comprising administering to the mammal a therapeutically effective amount of a modulating agent or subjecting the mammal to a modulating process, wherein the modulating agent or process alters the expression or activity of EMC9 to an inflammatory stimulus.
[0117] 3. The method of any one of paragraphs 1 or 2, wherein the modulating agent or process increases the expression or activity of EMC9.
[0118] 4. The method of paragraph 3, wherein the modulating agent is an activator of EMC9, an agonist antibody of EMC9, a cell expressing EMC9, a mimetic of EMC9, a derivative or recombinant form of EMC9, or a soluble form of EMC9.
[0119] 5. The method of paragraph 4, wherein the modulating process is overexpression of EMC9 or overexpression or depletion of a signal, signaling regulator, or receptor associated with EMC9.
[0120] 6. The method of any one of paragraphs 1-5, wherein the modulating agent or process decreases the expression or activity of EMC9.
[0121] 7. The method of paragraph 6, wherein the modulating agent is an inhibitor of EMC9, an inhibiting or neutralizing antibody of EMC9, a moiety blocking a receptor associated with the gene target, or a RNAi molecule targeting EMC9.
[0122] 8. The method of paragraph 7, wherein the modulating process is depletion of cells expressing EMC9, overexpression or depletion of a signal, signaling regulator, or receptor associated with EMC9, depletion of a ligand of EMC9, or genetic ablation of EMC9.
[0123] 9. The method of any one of paragraphs 1-8, wherein the modulating agent is a protein, a peptide, a polynucleotide, a small molecule, or a chemical.
[0124] 10. The method of any one of paragraphs 1-9, wherein the modulating agent is delivered orally, by injection, by a lipid-based carrier, or by a nanoparticle-type carrier.
[0125] 11. The method of any one of paragraphs 1-10, wherein the modulating agent is delivered by an expression vector or plasmid containing a gene insert that codes for the modulating agent.
[0126] 12. The method of any one of paragraphs 1-11, wherein the modulating agent is associated with a gene editing technology.
[0127] 13. The method of any one of paragraphs 1-12, wherein the inflammatory stimulus is a bacterial lipopolysaccharide (LPS).
[0128] 14. The method of any one of paragraphs 1 and 3-13, wherein the disease of immune dysregulation is an inflammatory disease.
[0129] 15. The method of paragraph 14, wherein the inflammatory disease is sepsis, achalasia, acute or ischemic colitis, acute respiratory distress syndrome, allergy, allograft rejection, alveolitis, Alzheimer's disease, a neurological disease associated with amyloidosis, amebiasis, anaphylactic shock, angiitis, ankylosing spondylitis, appendicitis, arteritis, arthralgia, arthritides, asthma, atherosclerosis, Behcet's syndrome, Berger's disease, bronchiolitis, bronchitis, burns, cachexia, candidiasis, cerebral embolism, cerebral infarction, cholangitis, cholecystitis, chronic fatigue syndrome, celiac disease, congestive heart failure, Crohn's disease, cystic fibrosis, Dengue fever, dermatitis, dermatomyositis, disseminated bacteremia, diverticulitis, duodenal ulcers, emphysema, encephalitis, endocarditis, endotoxic shock, enteritis, eosinophilic granuloma, epididymitis, epiglottitis, fasciitis, filariasis, gastric ulcers, Goodpasture's syndrome, gout, graft-versus-host disease, granulomatosis, Guillan-Barre syndrome, hay fever, hepatitis, hepatitis B virus infection, hepatitis C virus infection, herpes infection, HIV infection, Hodgkin's disease, hydatid cysts, hyperpyrexia, immune complex disease, influenza, malaria, meningitis, multiple sclerosis, a multiple sclerosis-associated demyelination disease, myasthenia gravis, myocardial ischemia, myocarditis, neuralgia, neuritis, organ ischemia, organ necrosis, osteomyelitis, Paget's disease, pancreatitis, ulcerative pancreatitis, pseudomembranous colitis, pancreatitis, paralysis, peptic ulcers, periarteritis nodosa, pericarditis, periodontal disease, peritonitis, pharyngitis, pleurisy, pneumonitis, pneumonoultramicroscopicsilicovolcanokoniosis, prostatitis, pseudomembranous Reiter's syndrome, reperfusion injury, respiratory syncytial virus infection, rheumatic fever, rheumatoid arthritis, rhinitis, sarcoidosis, septic abortion, septicemia, sinusitis, forms of cancer having an inflammatory component, spinal cord injury, sunburn, synovitis, systemic lupus erythematosus, systemic lupus erythrocytosis, thrombophlebitis, thyroiditis, Type I diabetes, ulcerative colitis, urethritis, urticaria, uveitis, vaginitis, vasculitis, warts, wheals, or Whipple's disease.
[0130] 16. The method of paragraph 15, wherein the inflammatory disease is sepsis.
[0131] 17. The method of any one of paragraphs 1 and 3-16, wherein the disease of immune dysregulation is secondary induced inflammation.
[0132] 18. The method of paragraph 17, wherein the secondary induced inflammation is associated with a bacterial infection, a viral infection, a fungal infection, or a parasitic infection.
[0133] 19. The method of paragraph 18, wherein the inflammatory disease is allograft rejection and wherein the composition further comprises an immunosuppressant used to inhibit allograft rejection.
[0134] 20. The method of paragraph 19, wherein the inflammatory disease is a xenograft rejection and wherein the composition further comprises an immunosuppressant used to inhibit xenograft rejection.
[0135] 21. The method of paragraph 2, where the mammal has a cancer and the alteration of the expression or activity of the gene target increases an innate immune response of the mammal
[0136] 22. The method of any one of paragraphs 1-25, wherein the mammal is a human.

[0137] Gliptins, Benzamil, and ISA-2011B
[0138] 1. A method for treating a disease of immune dysregulation in a subject, said method comprising administering to the subject a therapeutically effective amount of a gliptin, benzamil, or ISA2011B.
[0139] 2. The method of paragraph 1, wherein the gliptin is vildagliptin, saxagliptin, alogliptin, linagliptin, sitagliptin, gemigliptin, anagliptin, and teneligliptin.
[0140] 3. The method of paragraph 2, wherein saxagliptin is administered.
[0141] 3. The method of paragraph 1, wherein benzamil is administered.
[0142] 4. The method of paragraph 1, wherein ISA2011B is administered.
[0143] 5. The method of paragraph 1, wherein the disease of immune dysregulation is sepsis, achalasia, acute or ischemic colitis, acute respiratory distress syndrome, allergy, allograft rejection, alveolitis, Alzheimer's disease, a neurological disease associated with amyloidosis, amebiasis, anaphylactic shock, angiitis, ankylosing spondylitis, appendicitis, arteritis, arthralgia, arthritides, asthma, atherosclerosis, Behcet's syndrome, Berger's disease, bronchiolitis, bronchitis, burns, cachexia, candidiasis, cerebral embolism, cerebral infarction, cholangitis, cholecystitis, chronic fatigue syndrome, celiac disease, congestive heart failure, Crohn's disease, cystic fibrosis, Dengue fever, dermatitis, dermatomyositis, disseminated bacteremia, diverticulitis, duodenal ulcers, emphysema, encephalitis, endocarditis, endotoxic shock, enteritis, eosinophilic granuloma, epididymitis, epiglottitis, fasciitis, filariasis, gastric ulcers, Goodpasture's syndrome, gout, graft-versus-host disease, granulomatosis, Guillan-Barre syndrome, hay fever, hepatitis, hepatitis B virus infection, hepatitis C virus infection, herpes infection, HIV infection, Hodgkin's disease, hydatid cysts, hyperpyrexia, immune complex disease, influenza, malaria, meningitis, multiple sclerosis, a multiple sclerosis-associated demyelination disease, myasthenia gravis, myocardial ischemia, myocarditis, neuralgia, neuritis, organ ischemia, organ necrosis, osteomyelitis, Paget's disease, pancreatitis, ulcerative pancreatitis, pseudomembranous colitis, pancreatitis, paralysis, peptic ulcers, periarteritis nodosa, pericarditis, periodontal disease, peritonitis, pharyngitis, pleurisy, pneumonitis, pneumonoultramicroscopicsilicovolcanokoniosis, prostatitis, pseudomembranous Reiter's syndrome, reperfusion injury, respiratory syncytial virus infection, rheumatic fever, rheumatoid arthritis, rhinitis, sarcoidosis, septic abortion, septicemia, sinusitis, forms of cancer having an inflammatory component, spinal cord injury, sunburn, synovitis, systemic lupus erythematosus, systemic lupus erythrocytosis, thrombophlebitis, thyroiditis, Type I diabetes, ulcerative colitis, urethritis, urticaria, uveitis, vaginitis, vasculitis, warts, wheals, or Whipple's disease.

[0144] Other features and advantages of the invention will be apparent from the following Detailed Description and the Claims.

### BRIEF DESCRIPTION OF THE DRAWINGS

[0145] This application file contains at least one drawing executed in color. Copies of this patent application with color drawings will be provided by the Office upon request and payment of the necessary fee.

[0146] FIG. 1A shows IRAK4 expression in 10 species with and without stimulation for various times. Resistant species are baboon, Rhesus monkey, rat and mouse; sensitive species are human, chimp, rabbit, sheep, cow, and pig; baseline conditions are at the far left.

[0147] FIG. 1B shows siRNA mediated knockdown of IRAK4 expression inhibits TNF release from human PBMCs to a similar extent as the LPS receptor TLR4. Data from 5 independent experiments using different human donors is plotted.

[0148] FIG. 1C shows IRAK4 kinase inhibitors block TNF release from whole blood stimulated with LPS. Representative of 2 experiments. This data confirms prior published work.

[0149] FIG. 2 shows TREML1 expression in 10 species with and without stimulation for various times. Resistant species are baboon, Rhesus monkey, rat and mouse; sensitive species are human, chimp, rabbit, sheep, cow, and pig; baseline conditions are at the far left.

[0150] FIG. 3 shows NFATC2 expression in 10 species with and without stimulation for various times. Resistant species are baboon, Rhesus monkey, rat and mouse; sensitive species are human, chimp, rabbit, sheep, cow, and pig; baseline conditions are at the far left.

[0151] FIG. 4 shows PLA2G10 expression in 10 species with and without stimulation for various times. Resistant species are baboon, Rhesus monkey, rat and mouse; sensitive species are human, chimp, rabbit, sheep, cow, and pig; baseline conditions are at the far left.

[0152] FIG. 5A shows SARM1 expression in 10 species with and without stimulation for various times. Resistant species are baboon, Rhesus monkey, rat and mouse; sensitive species are human, chimp, rabbit, sheep, cow, and pig; baseline conditions are at the far left.

[0153] FIG. 5B shows siRNA mediated knockdown of SARM1 expression inhibits TNF release from human PBMCs to a similar extent as the LPS receptor TLR4. Data from 5 independent experiments using different human donors is plotted.

[0154] FIG. 6 shows PIP5K1A expression in 10 species with and without stimulation for various times. Resistant species are baboon, Rhesus monkey, rat and mouse; sensitive species are human, chimp, rabbit, sheep, cow, and pig; baseline conditions are at the far left.

[0155] FIG. 7 shows PDIA4 expression in 10 species with and without stimulation for various times. Resistant species are baboon, Rhesus monkey, rat and mouse; sensitive species are human, chimp, rabbit, sheep, cow, and pig; baseline conditions are at the far left.

[0156] FIG. 8 shows ARPC4 expression in 10 species with and without stimulation for various times. Resistant species are baboon, Rhesus monkey, rat and mouse; sensitive species are human, chimp, rabbit, sheep, cow, and pig; baseline conditions are at the far left.

[0157] FIG. 9 shows BNIP3 expression in 10 species with and without stimulation for various times. Resistant species are baboon, Rhesus monkey, rat and mouse; sensitive species are human, chimp, rabbit, sheep, cow, and pig; baseline conditions are at the far left.

[0158] FIG. 10 shows CCDC65 expression in 10 species with and without stimulation for various times. Resistant species are baboon, Rhesus monkey, rat, and mouse; sensitive species are human, chimp, rabbit, sheep, cow, and pig; baseline conditions are at the far left.

[0159] FIG. 11 shows CENPH expression in 10 species with and without stimulation for various times. Resistant species are baboon, Rhesus monkey, rat, and mouse; sensitive species are human, chimp, rabbit, sheep, cow, and pig; baseline conditions are at the far left.

[0160] FIG. 12 shows CHPT1 expression in 10 species with and without stimulation for various times. Resistant species are baboon, Rhesus monkey, rat, and mouse; sensitive species are human, chimp, rabbit, sheep, cow, and pig; baseline conditions are at the far left.

[0161] FIG. 13 shows COMMD3 expression in 10 species with and without stimulation for various times. Resistant species are baboon, Rhesus monkey, rat, and mouse; sensitive species are human, chimp, rabbit, sheep, cow, and pig; baseline conditions are at the far left.

[0162] FIG. 14 shows DR1 expression in 10 species with and without stimulation for various times. Resistant species are baboon, Rhesus monkey, rat, and mouse; sensitive species are human, chimp, rabbit, sheep, cow, and pig; baseline conditions are at the far left.

[0163] FIG. 15 shows EMC9 expression in 10 species with and without stimulation for various times. Resistant species are baboon, Rhesus monkey, rat, and mouse; sensitive species are human, chimp, rabbit, sheep, cow, and pig; baseline conditions are at the far left.

[0164] FIG. 16 shows FGD1 expression in 10 species with and without stimulation for various times. Resistant species are baboon, Rhesus monkey, rat, and mouse; sensitive species are human, chimp, rabbit, sheep, cow, and pig; baseline conditions are at the far left.

[0165] FIG. 17 shows FIGNL1 expression in 10 species with and without stimulation for various times. Resistant species are baboon, Rhesus monkey, rat, and mouse; sensitive species are human, chimp, rabbit, sheep, cow, and pig; baseline conditions are at the far left.

[0166] FIG. 18 shows GGNBP2 expression in 10 species with and without stimulation for various times. Resistant species are baboon, Rhesus monkey, rat, and mouse; sensitive species are human, chimp, rabbit, sheep, cow, and pig; baseline conditions are at the far left.

[0167] FIG. 19 shows GNAO1 expression in 10 species with and without stimulation for various times. Resistant species are baboon, Rhesus monkey, rat, and mouse; sensitive species are human, chimp, rabbit, sheep, cow, and pig; baseline conditions are at the far left.

[0168] FIG. 20 shows H2AFZ expression in 10 species with and without stimulation for various times. Resistant species are baboon, Rhesus monkey, rat, and mouse; sensitive species are human, chimp, rabbit, sheep, cow, and pig; baseline conditions are at the far left.

[0169] FIG. 21 shows HSPB1 expression in 10 species with and without stimulation for various times. Resistant species are baboon, Rhesus monkey, rat, and mouse; sensitive species are human, chimp, rabbit, sheep, cow, and pig; baseline conditions are at the far left.

[0170] FIG. 22 shows IL17RB expression in 10 species with and without stimulation for various times. Resistant species are baboon, Rhesus monkey, rat, and mouse; sensitive species are human, chimp, rabbit, sheep, cow, and pig; baseline conditions are at the far left.

[0171] FIG. 23 shows IL17RC expression in 10 species with and without stimulation for various times. Resistant species are baboon, Rhesus monkey, rat, and mouse; sensitive species are human, chimp, rabbit, sheep, cow, and pig; baseline conditions are at the far left.

[0172] FIG. 24 shows ILF2 expression in 10 species with and without stimulation for various times. Resistant species are baboon, Rhesus monkey, rat, and mouse; sensitive species are human, chimp, rabbit, sheep, cow, and pig; baseline conditions are at the far left.

[0173] FIG. 25 shows PDCD6 expression in 10 species with and without stimulation for various times. Resistant species are baboon, Rhesus monkey, rat, and mouse; sensitive species are human, chimp, rabbit, sheep, cow, and pig; baseline conditions are at the far left.

[0174] FIG. 26 shows PEAR1 expression in 10 species with and without stimulation for various times. Resistant species are baboon, Rhesus monkey, rat, and mouse; sensitive species are human, chimp, rabbit, sheep, cow, and pig; baseline conditions are at the far left.

[0175] FIG. 27 shows PI3 expression in 10 species with and without stimulation for various times. Resistant species are baboon, Rhesus monkey, rat, and mouse; sensitive species are human, chimp, rabbit, sheep, cow, and pig; baseline conditions are at the far left.

[0176] FIG. 28 shows POFUT2 expression in 10 species with and without stimulation for various times. Resistant species are baboon, Rhesus monkey, rat, and mouse; sensitive species are human, chimp, rabbit, sheep, cow, and pig; baseline conditions are at the far left.

[0177] FIG. 29 shows RABGEF1 expression in 10 species with and without stimulation for various times. Resistant species are baboon, Rhesus monkey, rat, and mouse; sensitive species are human, chimp, rabbit, sheep, cow, and pig; baseline conditions are at the far left.

[0178] FIG. 30 shows RBM4 expression in 10 species with and without stimulation for various times. Resistant species are baboon, Rhesus monkey, rat, and mouse; sensitive species are human, chimp, rabbit, sheep, cow, and pig; baseline conditions are at the far left.

[0179] FIG. 31 shows SFN expression in 10 species with and without stimulation for various times Resistant species are baboon, Rhesus monkey, rat, and mouse; sensitive species are human, chimp, rabbit, sheep, cow, and pig; baseline conditions are at the far left.

[0180] FIG. 32 shows SKA2 expression in 10 species with and without stimulation for various times. Resistant species are baboon, Rhesus monkey, rat, and mouse; sensitive species are human, chimp, rabbit, sheep, cow, and pig; baseline conditions are at the far left.

[0181] FIG. 33 shows SLC38A2 expression in 10 species with and without stimulation for various times. Resistant species are baboon, Rhesus monkey, rat, and mouse; sensitive species are human, chimp, rabbit, sheep, cow, and pig; baseline conditions are at the far left.

[0182] FIG. 34 shows SNRPA1 expression in 10 species with and without stimulation for various times. Resistant species are baboon, Rhesus monkey, rat, and mouse; sensitive species are human, chimp, rabbit, sheep, cow, and pig; baseline conditions are at the far left.

[0183] FIG. 35 shows SPCS2 expression in 10 species with and without stimulation for various times. Resistant species are baboon, Rhesus monkey, rat, and mouse; sensitive species are human, chimp, rabbit, sheep, cow, and pig; baseline conditions are at the far left.

[0184] FIG. 36 shows TAF1D expression in 10 species with and without stimulation for various times. Resistant species are baboon, Rhesus monkey, rat, and mouse; sensitive species are human, chimp, rabbit, sheep, cow, and pig; baseline conditions are at the far left.

[0185] FIG. 37 shows TNFSF10 expression in 10 species with and without stimulation for various times. Resistant species are baboon, Rhesus monkey, rat, and mouse; sensitive species are human, chimp, rabbit, sheep, cow, and pig; baseline conditions are at the far left.

[0186] FIG. 38 shows ZNF302 expression in 10 species with and without stimulation for various times. Resistant species are baboon, Rhesus monkey, rat, and mouse; sensitive species are human, chimp, rabbit, sheep, cow, and pig; baseline conditions are at the far left.

[0187] FIG. 39 shows ZNF333 expression in 10 species with and without stimulation for various times. Resistant species are baboon, Rhesus monkey, rat, and mouse; sensitive species are human, chimp, rabbit, sheep, cow, and pig; baseline conditions are at the far left.

[0188] FIG. 40 shows ZNF419 expression in 10 species with and without stimulation for various times. Resistant species are baboon, Rhesus monkey, rat, and mouse; sensitive species are human, chimp, rabbit, sheep, cow, and pig; baseline conditions are at the far left.

[0189] FIG. 41 shows ZNF624 expression in 10 species with and without stimulation for various times. Resistant species are baboon, Rhesus monkey, rat, and mouse; sensitive species are human, chimp, rabbit, sheep, cow, and pig; baseline conditions are at the far left.

[0190] FIG. 42 shows ZNF677 expression in 10 species with and without stimulation for various times. Resistant species are baboon, Rhesus monkey, rat, and mouse; sensitive species are human, chimp, rabbit, sheep, cow, and pig; baseline conditions are at the far left.

[0191] FIG. 43 shows ZNF720 expression in 10 species with and without stimulation for various times. Resistant species are baboon, Rhesus monkey, rat, and mouse; sensitive species are human, chimp, rabbit, sheep, cow, and pig; baseline conditions are at the far left.

[0192] FIG. 44 shows the fold change on LPS stimulation in CD14 expression after 2 hours. Resistant species are baboon, Rhesus monkey, rat, and mouse; sensitive species are human, chimp, rabbit, sheep, cow, and pig.

[0193] FIG. 45 shows the fold change on LPS stimulation in AOAH expression after 24 hours. Resistant species are baboon, Rhesus monkey, rat, and mouse; sensitive species are human, chimp, rabbit, sheep, cow, and pig.

[0194] FIG. 46 shows the fold change on LPS stimulation in SLC8A1 expression after 6 hours. Resistant species are baboon, Rhesus monkey, rat, and mouse; sensitive species are human, chimp, rabbit, sheep, cow, and pig.

[0195] FIG. 47 shows the fold change on LPS stimulation in ASPRV1 expression after 6 hours. Resistant species are baboon, Rhesus monkey, rat, and mouse; sensitive species are human, chimp, rabbit, sheep, cow, and pig.

[0196] FIG. 48 shows the fold change on LPS stimulation in ARHGEF10L expression after 6 hours. Resistant species are baboon, Rhesus monkey, rat, and mouse; sensitive species are human, chimp, rabbit, sheep, cow, and pig.

[0197] FIG. 49 shows the fold change on LPS stimulation in EHD1 expression after 6 hours. Resistant species are baboon, Rhesus monkey, rat, and mouse; sensitive species are human, chimp, rabbit, sheep, cow, and pig.

[0198] FIG. 50 shows the fold change on LPS stimulation in LCN2 expression after 2 hours. Resistant species are baboon, Rhesus monkey, rat, and mouse; sensitive species are human, chimp, rabbit, sheep, cow, and pig.

[0199] FIG. 51 shows the fold change on LPS stimulation in LCN2 expression after 6 hours. Resistant species are baboon, Rhesus monkey, rat, and mouse; sensitive species are human, chimp, rabbit, sheep, cow, and pig.

[0200] FIG. 52 shows the fold change on LPS stimulation in ST3GAL6 expression after 6 hours Resistant species are baboon, Rhesus monkey, rat, and mouse; sensitive species are human, chimp, rabbit, sheep, cow, and pig.

[0201] FIG. 53 shows the fold change on LPS stimulation in MFSD1 expression after 24 hours. Resistant species are baboon, Rhesus monkey, rat, and mouse; sensitive species are human, chimp, rabbit, sheep, cow, and pig.

[0202] FIG. 54 shows the protein abundance of LPA. Resistant species are baboon, Rhesus monkey, mouse, and rat; sensitive species are human, chimp, rabbit, cow, pig, and sheep.

[0203] FIG. 55 shows the protein abundance of PECAM1. Resistant species are baboon, Rhesus monkey, mouse, and rat; sensitive species are human, chimp, rabbit, cow, pig, and sheep.

[0204] FIG. 56 shows the protein abundance of ESAM. Resistant species are baboon, Rhesus monkey, mouse, and rat; sensitive species are human, chimp, rabbit, cow, pig, and sheep.

[0205] FIG. 57 shows the protein abundance of AFM. Resistant species are baboon, Rhesus monkey, mouse, and rat; sensitive species are human, chimp, rabbit, cow, pig, and sheep.

[0206] FIG. 58 shows the protein abundance of APCS. Resistant species are baboon, Rhesus monkey, mouse, and rat; sensitive species are human, chimp, rabbit, cow, pig, and sheep.

[0207] FIG. 59 shows the protein abundance of B4GAT1. Resistant species are baboon, Rhesus monkey, mouse, and rat; sensitive species are human, chimp, rabbit, cow, pig, and sheep.

[0208] FIG. 60 shows the protein abundance of CDH6. Resistant species are baboon, Rhesus monkey, mouse, and rat; sensitive species are human, chimp, rabbit, cow, pig, and sheep.

[0209] FIG. 61 shows the protein abundance of CUTA. Resistant species are baboon, Rhesus monkey, mouse, and rat; sensitive species are human, chimp, rabbit, cow, pig, and sheep.

[0210] FIG. 62 shows the protein abundance of DMBT1. Resistant species are baboon, Rhesus monkey, mouse, and rat; sensitive species are human, chimp, rabbit, cow, pig, and sheep.

[0211] FIG. 63 shows the protein abundance of F12. Resistant species are baboon, Rhesus monkey, mouse, and rat; sensitive species are human, chimp, rabbit, cow, pig, and sheep.

[0212] FIG. 64 shows the protein abundance of FCGBP. Resistant species are baboon, Rhesus monkey, mouse, and rat; sensitive species are human, chimp, rabbit, cow, pig, and sheep.

[0213] FIG. 65 shows the protein abundance of GCA. Resistant species are baboon, Rhesus monkey, mouse, and rat; sensitive species are human, chimp, rabbit, cow, pig, and sheep.

[0214] FIG. 66 shows the protein abundance of GLOD4. Resistant species are baboon, Rhesus monkey, mouse, and rat; sensitive species are human, chimp, rabbit, cow, pig, and sheep.

[0215] FIG. 67 shows the protein abundance of GP5. Resistant species are baboon, Rhesus monkey, mouse, and rat; sensitive species are human, chimp, rabbit, cow, pig, and sheep.

[0216] FIG. 68 shows the protein abundance of HGFAC. Resistant species are baboon, Rhesus monkey, mouse, and rat; sensitive species are human, chimp, rabbit, cow, pig, and sheep.

[0217] FIG. 69 shows the protein abundance of IGF1. Resistant species are baboon, Rhesus monkey, mouse, and rat; sensitive species are human, chimp, rabbit, cow, pig, and sheep.

[0218] FIG. 70 shows the protein abundance of MMRN2 Resistant species are baboon, Rhesus monkey, mouse, and rat; sensitive species are human, chimp, rabbit, cow, pig, and sheep.

[0219] FIG. 71 shows the protein abundance of OSMR. Resistant species are baboon, Rhesus monkey, mouse, and rat; sensitive species are human, chimp, rabbit, cow, pig, and sheep.

[0220] FIG. 72 shows the protein abundance of PF4V1. Resistant species are baboon, Rhesus monkey, mouse, and rat; sensitive species are human, chimp, rabbit, cow, pig, and sheep.

[0221] FIG. 73 shows the protein abundance of PFKL. Resistant species are baboon, Rhesus monkey, mouse, and rat; sensitive species are human, chimp, rabbit, cow, pig, and sheep.

[0222] FIG. 74 shows the protein abundance of POSTN. Resistant species are baboon, Rhesus monkey, mouse, and rat; sensitive species are human, chimp, rabbit, cow, pig, and sheep.

[0223] FIG. 75 shows the protein abundance of SAA4. Resistant species are baboon, Rhesus monkey, mouse, and rat; sensitive species are human, chimp, rabbit, cow, pig, and sheep.

[0224] FIG. 76 shows the protein abundance of SSC5D. Resistant species are baboon, Rhesus monkey, mouse, and rat; sensitive species are human, chimp, rabbit, cow, pig, and sheep.

[0225] FIG. 77 shows the protein abundance of TIMP3. Resistant species are baboon, Rhesus monkey, mouse, and rat; sensitive species are human, chimp, rabbit, cow, pig, and sheep.

[0226] FIG. 78 shows the protein abundance of TNXB. Resistant species are baboon, Rhesus monkey, mouse, and rat; sensitive species are human, chimp, rabbit, cow, pig, and sheep.

[0227] FIG. 79 shows the protein abundance of YWHAG. Resistant species are baboon, Rhesus monkey, mouse, and rat; sensitive species are human, chimp, rabbit, cow, pig, and sheep.

[0228] FIG. 80A shows DPP4 expression in endothelial cells from different species. Resistant species are rat and mouse; sensitive species are cow and human.

[0229] FIG. 80B shows DPP4 expression in human endothelial cells cultured in serum from different species. Resistant species are mouse and rat, sensitive species is human.

[0230] FIG. 80C shows ECIS plots demonstrating that saxagliptin, a DPP4 inhibitor, causes a dose dependent reduction in human endothelial cell barrier permeability following HKEC stimulation.

[0231] FIG. 81A shows BMP4 expression in endothelial cells from different species. Resistant species are colored are rat and mouse, sensitive species are cow and human.

[0232] FIG. 81B shows BMP4 expression in human endothelial cells cultured in serum from different species. Resistant species are mouse and rat, sensitive species is human.

[0233] FIG. 81C shows proinflammatory cytokine secretion from whole blood treated with and without LPS and with and without SJ00291942, an agonist of BMP receptor signaling.

[0234] FIG. 82A shows MYLK2 expression of human endothelial cells pretreated with HKEC (tolerant) and without pre-treatment prior to to the indicated stimulations.

[0235] FIG. 82B shows MYLK2 expression in endothelial cells from different species. Resistant species are rat and mouse, sensitive species is human.

[0236] FIG. 82C shows MYLK4 expression of human endothelial cells pretreated with HKEC (tolerant) and without pre-treatment prior to the indicated stimulations.

[0237] FIG. 82D shows MYLK4 expression in endothelial cells from different species. Resistant species are rat and mouse, sensitive species is human.

[0238] FIG. 83A shows ADAM12 expression in endothelial cells from different species. Resistant species are rat and mouse, sensitive species are cow and human.

[0239] FIG. 83B shows ADAM12 expression in human endothelial cells cultured in serum from different species. Resistant species are rat and mouse, sensitive species is human.

[0240] FIG. 83C shows ADAM19 expression in endothelial cells from different species. Resistant species are rat and mouse, sensitive species is human.

[0241] FIG. 83D shows ADAM19 expression in human endothelial cells cultured in serum from different species. Resistant species are mouse and rat, sensitive species is human.

[0242] FIG. 84A shows ADRB1 expression in endothelial cells from different species. Resistant species are rat and mouse, sensitive species are cow and human.

[0243] FIG. 84B shows ADRB1 expression in human endothelial cells cultured in serum from different species. Resistant species are mouse and rat, sensitive species is human.

[0244] FIG. 85A shows ALDH1A2 expression in endothelial cells from different species. c

[0245] FIG. 85B shows ALDH1A2 expression in human endothelial cells cultured in serum from different species. Resistant species are mouse and rat, sensitive species is human.

[0246] FIG. 85C shows ALDH1A2 of human endothelial cells pretreated with HKEC (tolerant) and without pre-treatment prior to the indicated stimulations.

[0247] FIG. 86A shows ANKRD55 expression in endothelial cells from different species. Resistant species are rat and mouse, sensitive species are cow and human.

[0248] FIG. 86B shows ANKRD55 expression in human endothelial cells cultured in serum from different species. Resistant species are mouse and rat, sensitive species is human.

[0249] FIG. 87A shows CLU expression in endothelial cells from different species. Resistant species are rat and mouse, sensitive species are cow and humans.

[0250] FIG. 87B shows CLU expression in human endothelial cells cultured in serum from different species. Resistant species are mouse and rat, sensitive species is human.

[0251] FIG. 88A shows CTDSPL expression in endothelial cells from different species. Resistant species are rat and mouse, sensitive species are cow and humans.

[0252] FIG. 88B shows CTDSPL expression in human endothelial cells cultured in serum from different species.

[0253] Resistant species are mouse and rat, sensitive species is human.

[0254] FIG. 89A shows CTNNAL1 expression in endothelial cells from different species. Resistant species are mouse and rat, sensitive species is human.

[0255] FIG. 89B shows CTNNAL1 expression in human endothelial cells cultured in serum from different species. Resistant species are mouse and rat, sensitive species is human.

[0256] FIG. 90A shows DHFR expression in endothelial cells from different species. Resistant species are rat and mouse, sensitive species are cow and humans.

[0257] FIG. 90B shows DHFR expression in human endothelial cells cultured in serum from different species. Resistant species are mouse and rat, sensitive species is human.

[0258] FIG. 91A shows DNAJB4 expression in endothelial cells from different species. Resistant species are rat and mouse, sensitive species are cow and humans.

[0259] FIG. 91B shows DNAJB4 expression in endothelial cells cultured in serum from different species. Resistant species are mouse and rat, sensitive species is human.

[0260] FIG. 92A shows DPYD expression in endothelial cells from different species. Resistant species are rat and mouse, sensitive species are cow and humans.

[0261] FIG. 92B shows DPYD expression in human endothelial cells cultured in serum from different species. Resistant species are mouse and rat, sensitive species is human.

[0262] FIG. 93A shows FZD10 expression in human endothelial cells cultured in serum from different species. Resistant species are mouse and rat, sensitive species is human.

[0263] FIG. 93B shows FZD10 expression expression of human endothelial cells pretreated with HKEC (tolerant) and without pre-treatment prior to the indicated stimulations.

[0264] FIG. 94A shows GAB1 expression in endothelial cells from different species. Resistant species are rat and mouse, sensitive species are cow and humans.

[0265] FIG. 94B shows GAB1 expression in human endothelial cells cultured in serum from different species.

[0266] Resistant species are mouse and rat, sensitive species is human.

[0267] FIG. 95A shows GADD45G expression in endothelial cells from different species. Resistant species are rat and mouse, sensitive species are cow and humans.

[0268] FIG. 95B shows GADD45G expression in human endothelial cells cultured in serum from different species. Resistant species are mouse and rat, sensitive species is human.

[0269] FIG. 96A shows HCRTR1 expression in endothelial cells from different species. Resistant species are rat and mouse, sensitive species are cow and humans.

[0270] FIG. 96B shows HCRTR1 expression in human endothelial cells cultured in serum from different species. Resistant species are mouse and rat, sensitive species is human.

[0271] FIG. 97A shows IL7 expression in endothelial cells from different species. Resistant species are rat and mouse, sensitive species are cow and humans.

[0272] FIG. 97B shows IL7 expression in human endothelial cells cultured in serum from different species. Resistant species are mouse and rat, sensitive species is human.

[0273] FIG. 98A shows LRRC1 expression in endothelial cells from different species. Resistant species are rat and mouse, sensitive species are cow and humans.

[0274] FIG. 98B shows LRRC1 expression in human endothelial cells cultured in serum from different species.

[0275] Resistant species are mouse and rat, sensitive species is human.

[0276] FIG. 99A shows MYLIP expression in endothelial cells from different species. Resistant species are rat and mouse, sensitive species are cow and humans.

[0277] FIG. 99B shows MYLIP expression in human endothelial cells cultured in serum from different species. Resistant species are mouse and rat, sensitive species is human.

[0278] FIG. 100A shows NR1H3 expression in endothelial cells from different species. Resistant species are rat and mouse, sensitive species are cow and humans.

[0279] FIG. 100B shows NR1H3 expression in human endothelial cells cultured in serum from different species. Resistant species are mouse and rat, sensitive species is human.

[0280] FIG. 101A shows PCGF5 expression in endothelial cells from different species. Resistant species are rat and mouse, sensitive species are cow and humans.

[0281] FIG. 101B shows PCGF5 expression in human endothelial cells cultured in serum from different species. Resistant species are mouse and rat, sensitive species is human.

[0282] FIG. 102A shows PLSCR4 expression in endothelial cells from different species. Resistant species are rat and mouse, sensitive species are cow and humans.

[0283] FIG. 102B shows PLSCR4 expression in human endothelial cells cultured in serum from different species. Resistant species are mouse and rat, sensitive species is human.

[0284] FIG. 103A shows RAB11FIP1 expression in endothelial cell from different species. Resistant species are rat and mouse, sensitive species are cow and humans.

[0285] FIG. 103B shows RAB11FIP1 expression in human endothelial cells cultured in serum from different species. Resistant species are mouse and rat, sensitive species is human.

[0286] FIG. 104A shows RASD1 expression in endothelial cells from different species. Resistant species are rat and mouse, sensitive species are cow and humans.

[0287] FIG. 104B shows RASD1 expression in human endothelial cells cultured in serum from different species. Resistant species are mouse and rat, sensitive species is human.

[0288] FIG. 105A shows RGS16 expression in endothelial cells from different species. Resistant species are rat and mouse, sensitive species are cow and humans.

[0289] FIG. 105B shows RGS16 expression in human endothelial cells cultured in serum from different species. Resistant species are mouse and rat, sensitive species is human.

[0290] FIG. 106A shows RPGR expression in endothelial cells from different species. Resistant species are rat and mouse, sensitive species are cow and humans.

[0291] FIG. 106B shows RPGR expression in human endothelial cells cultured in serum from different species. Resistant species are mouse and rat, sensitive species is human.

[0292] FIG. 107A shows RUNX1T1 expression in endothelial cell from different species. Resistant species are rat and mouse, sensitive species are cow and humans.

[0293] FIG. 107B shows RUNX1T1 expression in human endothelial cells cultured in serum from different species. Resistant species are mouse and rat, sensitive species is human.

[0294] FIG. 108A shows SLC40A1 expression in endothelial cells from different species. Resistant species are rat and mouse, sensitive species are cow and humans.

[0295] FIG. 108B shows SLC40A1 expression in human endothelial cells cultured in serum from different species. Resistant species are mouse and rat, sensitive species is human.

[0296] FIG. 109A shows SLCO2A1 expression in endothelial cells from different species. Resistant species are rat and mouse, sensitive species are cow and humans.

[0297] FIG. 109B shows SLCO2A1 expression in human endothelial cells cultured in serum from different species. Resistant species are mouse and rat, sensitive species is human.

[0298] FIG. 110A shows STAT1 expression in endothelial cells from different species. Resistant species are rat and mouse, sensitive species are cow and humans.

[0299] FIG. 110B shows STAT1 expression in human endothelial cells cultured in serum from different species. Resistant species are mouse and rat, sensitive species is human.

[0300] FIG. 111A shows SULT1B1 expression in endothelial cells from different species. Resistant species are rat and mouse, sensitive species are cow and humans.

[0301] FIG. 111B shows SULT1B1 expression in human endothelial cells cultured in serum from different species. Resistant species are mouse and rat, sensitive species is human.

[0302] FIG. 112A shows TBC1D8 expression in endothelial cells from different species. Resistant species are rat and mouse, sensitive species are cow and humans.

[0303] FIG. 112B shows TBC1D8 expression in human endothelial cells cultured in serum from different species. Resistant species are mouse and rat, sensitive species is human.

[0304] FIG. 113A shows TGM2 expression in endothelial cells from different species. Resistant species are rat and mouse, sensitive species are cow and humans.

[0305] FIG. 113B shows TGM2 expression in human endothelial cells cultured in serum from different species. Resistant species are mouse and rat, sensitive species is human.

[0306] FIG. 114A shows WNT4 expression in endothelial cells cultured in serum from different species.

[0307] Resistant species are mouse and rat, sensitive species is human.

[0308] FIG. 114B shows WNT4 expression of human endothelial cells pretreated with HKEC (tolerant) and without pre-treatment prior to the indicated stimulations.

[0309] FIG. 115A shows FGF1 expression in endothelial cells from different species. Resistant species are rat and mouse, sensitive species are cow and humans.

[0310] FIG. 115B shows FGF1 expression of human endothelial cells pretreated with HKEC (tolerant) and without pre-treatment prior to the indicated stimulations.

### DETAILED DESCRIPTION OF THE INVENTION

[0311] The existence of some resistant species (for example, mice) that appear to be intrinsically tolerant to most inflammatory challenges compared to other species (for example, humans) provides the basis for the study described herein. We have reasoned that resistant species possess mechanism(s) to limit secondary inflammation following a pro-inflammatory stimulus and that these mechanisms are missing or ineffective in sensitive species (for example, humans).

[0312] Notably, animal species which are relatively resistant to inflammation do not appear to be necessarily relatively immunocompromised compared to species that are more sensitive to inflammatory challenge. For example, mice do not appear more immunocompromised than humans. This observation questions the current dogma that all secondarily induced inflammation is necessary for host protection and raises the possibility that the underlying mechanisms leading to the increased inflammatory resistance in these more resistant species may be exploited for human benefit.

[0313] This same variation in baseline sensitivity to inflammatory agonist challenge also raises important issues as to the validity of the use of many animal models that are currently used to reflect human disease. Tremendous resources are invested worldwide in the use of animal models for the development of new drugs and to explore the pathophysiology of inflammatory diseases. However, if the species that are studied have different innate tolerance to the same pro-inflammatory stimulus, the results from these models may be misinterpreted.

[0314] The mechanisms governing interspecies differences in natural tolerance are largely unknown. Most investigators have simply ignored this issue. Data comparing species response comes from animals that have been challenged with endotoxin. Because endotoxin has been injected into different animal species over the many decades, and because the biological portion of the endotoxin molecule—Lipid A—is similar in structure and potency for most endotoxins, it is possible to create a rough analysis of the sensitivity of different species to endotoxin (lipopolysaccharide, LPS). Species vary at least a million-fold in response to endotoxin challenge, with readouts being either death or severe disease. Notably, humans fall at the extreme sensitive end of the spectrum, whereas mice are at least 1000- to 100,000-fold more resistant.

[0315] For example, species that that are resistant to greater than 1 mg/kg LPS include mice, rats, rhesus monkeys (rhesus macaque) and baboon, and more sensitive species include rabbits, pigs, cows, sheep, chimps and humans.

[0316] Collectively, different vertebrate species vary over many orders of magnitude in their sensitivity to inflammatory stimuli, such as endotoxin (for example, LPS). Humans are extremely sensitive to LPS, whereas some species, including mice and many monkeys, are highly resistant to LPS. Accordingly, we have reasoned that agents conferring the type of resistance seen in mice and some non-human primates to humans are useful as effective therapies against diseases involving, for example, systemic inflammation.

[0317] As is disclosed herein, we studied and compared selected species that have high innate resistance (such as baboon, Rhesus monkey (rhesus macaque), rat, and mouse) to a pro-inflammatory challenge with selected species such as humans that have low innate resistance (high sensitivity to inflammatory challenge) in order to discover molecular gene and pathway targets that can be manipulated for therapeutic benefit.

[0318] Such therapeutic manipulation includes, for example, depending on the target and the treatment goal, the following:
[0319] 1. Activation (e.g., induction) or down regulation (e.g., blockage) of specific genes and pathways and their downstream products to modify the inflammatory response in a species that is innately sensitive to inflammation (such as humans) in a way that would mimic a resistant species for the purpose of decreasing innate inflammation in disease settings in which this would be therapeutically desirable.
[0320] 2. Conversely, such manipulation includes activation (e.g., induction) or down regulation (e.g., blockage) of specific genes and pathways and their downstream products to render the species even more sensitive than baseline when this may be therapeutically desirable (such as for example in the case of a vaccine adjuvant or cancer treatment in which this would be therapeutically beneficial).

### Overview

[0321] Described herein are methods for identifying gene targets that can be manipulated to develop therapies for modulating inflammation. Our methods for target identification take advantage of the observation as is described above that different species vary over many orders of magnitude in their sensitivity to inflammatory stimuli, such as endotoxin (LPS). Humans, for example, are sensitive to LPS, whereas many species used during preclinical development, such as mice and some non-human primates, are highly resistant to LPS. This sensitivity extends beyond LPS but to many conditions as is described herein.

[0322] We have compared, as is disclosed herein, the behavior of cells in whole blood and endothelial cells and constituents of the blood plasma in resistant species with that of sensitive species, or under conditions that alter sensitivity, to identify gene targets including their pathways, and proteins that regulate such differences.

[0323] Agents that confer the resistance seen in resistant species to humans are therefore considered useful as therapies against diseases involving systemic inflammation. Such exemplary diseases include sepsis, achalasia, acute or ischemic colitis, acute respiratory distress syndrome, allergy, allograft rejection, alveolitis, Alzheimer's disease, a neurological disease associated with amyloidosis, amebiasis, anaphylactic shock, angiitis, ankylosing spondylitis, appendicitis, arteritis, arthralgia, arthritides, asthma, atherosclerosis, Behcet's syndrome, Berger's disease, bronchiolitis, bronchitis, burns, cachexia, candidiasis, cerebral embolism, cerebral infarction, cholangitis, cholecystitis, chronic fatigue syndrome, celiac disease, congestive heart failure, Crohn's disease, cystic fibrosis, Dengue fever, dermatitis, dermatomyositis, disseminated bacteremia, diverticulitis, duodenal ulcers, emphysema, encephalitis, endocarditis, endotoxic shock, enteritis, eosinophilic granuloma, epididymitis, epiglottitis, fasciitis, filariasis, gastric ulcers, Goodpasture's syndrome, gout, graft-versus-host disease, granulomatosis, Guillan-Barre syndrome, hay fever, hepatitis, hepatitis B virus infection, hepatitis C virus infection, herpes infection, HIV infection, Hodgkin's disease, hydatid cysts, hyperpyrexia, immune complex disease, influenza, malaria, meningitis, multiple sclerosis, a multiple sclerosis-associated demyelination disease, myasthenia gravis, myocardial ischemia, myocarditis, neuralgia, neuritis, organ ischemia, organ necrosis, osteomyelitis, Paget's disease, pancreatitis, ulcerative pancreatitis, pseudomembranous colitis, pancreatitis, paralysis, peptic ulcers, periarteritis nodosa, pericarditis, periodontal disease, peritonitis, pharyngitis, pleurisy, pneumonitis, pneumonoultramicroscopicsilicovolcanokoniosis, prostatitis, pseudomembranous Reiter's syndrome, reperfusion injury, respiratory syncytial virus infection, rheumatic fever, rheumatoid arthritis, rhinitis, sarcoidosis, septic abortion, septicemia, sinusitis, spinal cord injury, sunburn, synovitis, systemic lupus erythematosus, systemic lupus erythrocytosis, thrombophlebitis, thyroiditis, Type I diabetes, ulcerative colitis, urethritis, urticaria, uveitis, vaginitis, vasculitis, warts, wheals, or Whipple's disease. Still other conditions include chronic inflammation caused by, for example, bacterial, viral, and parasitic infections, or chemical irritants (e.g., asbestos).

[0324] Conversely, agents that further increase the sensitivity of humans are accordingly considered as useful therapies in diseases in which there is insufficient innate immunity, such as in most cancer. Exemplary cancers include melanoma and carcinomas of the head and neck, breast, lung, prostate, bladder, kidney, colon, ovary, and esophagus.

Diseases Associated with Inflammation

[0325] Many diseases have inflammation as either a primary or secondary driver of illness. Such diseases include infection from any cause with secondary induced inflammation, acute or chronic autoimmune diseases including inflammatory bowel disease, rheumatoid arthritis, and vasculitis as well as other chronic diseases such as Alzheimer's disease and atherosclerosis or other diseases in which chronic inflammation is present.

[0326] The fact that some species are intrinsically resistant to innate inflammatory stimuli but are not immunocompromised, whereas others, including humans, are intrinsically highly sensitive to inflammatory stimuli, indicates that innate inflammation is not necessary for protection against microorganisms, and therefore that therapies that are based upon mimicking species differences to alter inflammation would not necessarily result in alterations in immunity. Accordingly, inflammation can be dissociated from immunity.

[0327] The response of whole blood, for example, to stimulation with endotoxin or killed bacteria, or more specifically the secondary induction of cytokines such as but not limited to TNF or IL6 is thought to mimic the in vivo condition. For example, whole blood from sensitive species such as humans stimulated with LPS or killed E. coli produces large concentrations of TNF, whereas there is almost no TNF produced under identical conditions in the resistant mouse species whole blood. This is consistent with the relative difference in sensitivity to LPS in the two species in vivo. We have, as is described below, used a whole blood system to assess the state of the blood cells in response to LPS in different species.

[0328] Endothelial cells provide a highly dynamic interactive lining of blood vessels. These cells respond to stimulation with pro-inflammatory stimuli to mediate inflammation, while at the same time creating a barrier to prevent leakage of cells and plasma into the surrounding tissues. Loss of the endothelial barrier leads to decreased oxygenation and increased inflammation. In addition, red blood cells (RBCs) are released into areas of injury, where their breakdown products of hemoglobin and heme likely further amplify inflammation. This leakage across the endothelial barrier may be particularly important in lungs where fluid in alveoli may interfere with air exchange and lead to hypoxia.

### Methodology

[0329] 1. Below we describe methods to identify therapeutic targets for treatment of diseases involving dysregulated innate immunity. Specifically, drug targets were discovered by comparing whole blood cell transcriptomics and plasma proteomics from six (6) species that we classified as having sensitive innate immunity and four (4) species that we classified as resistant innate immunity (based upon published data for endotoxin challenge). We also developed drug targets for endothelial cells by identifying shared transcriptomic features when comparing gene expression between endothelial cells derived from different species, human endothelial cells exposed to the serum of either sensitive or resistant species, or human endothelial cells rendered resistant to LPS stimulation by prior treatment (tolerance).
[0330] 2. Targets described herein are listed, for example, either as genes or serum proteins.
   [0331] a. In the case of genes, therapeutics will affect or mimic, indirectly or directly, the gene's expression or the gene product's activity. Useful therapeutics include agents or methods which manipulate gene expression, including but not limited to siRNA or directed CRISPR or similar gene editing methods, or injection of host cells in which the gene of interest or its expression has been specifically altered. Cells can also be altered either in vivo or ex vivo after which the altered cell is injected into the host. The gene product, if desired, may also be targeted by injecting polyclonal or monoclonal antibodies which are engineered to alter the gene product of the targeted genes, or by large or small molecules that directly or indirectly alter the behavior of the gene product.
   [0332] b. In the case of serum proteins, therapeutics may be peptides or recombinant proteins or antibodies that mimic or enhance their biological activity, or agents that prevent functional binding of the protein to its cellular receptor or otherwise interfere with their function.
[0333] 3. Targets can also be separated by the analysis method used to identify them, for example, leukocyte transcriptomics, endothelial cell transcriptomics, and serum proteomics. Such separation provides a basis for predicting their site of functional importance.
[0334] 4. The studies described herein include data using several existing drugs or therapeutic candidates. These may or may not be approved therapies for treatment of indications described herein. We accordingly envisage repurposing these drugs for new indications, with or without modification, or designing new drugs with the same molecular targets.
[0335] 5. An effective therapeutic may either inhibit or promote a target's activity in order to achieve the desired effect.
[0336] 6. Some targets described herein are known mediators of the immune response. Such targets provide a basis for validating the usefulness of the disclosed methods, and accordingly provide support for targets for which we do not otherwise have supporting data.
[0337] 7. Exemplary targets are disclosed throughout the specification. Preferred targets are listed in Tables 6 and 7. Other targets (including known isoforms) may have identity (for example 40 percent identity) with a target found in these tables. Nucleotide sequences of the targets are readily obtained according to standard techniques. As used herein the term “percent identity” refers to percent (%) sequence identity with respect to a reference polynucleotide or polypeptide sequence following alignment by standard techniques. Alignment for purposes of determining percent nucleic acid or amino acid sequence identity can be achieved in various ways that are within the capabilities of one of skill in the art, for example, using publicly available computer software such as BLAST, BLAST-2, PSI-BLAST, or Megalign software. Those skilled in the art can determine appropriate parameters for aligning sequences, including any algorithms needed to achieve maximal alignment over the full length of the sequences being compared. For example, percent sequence identity values may be generated using the sequence comparison computer program BLAST. As an illustration, the percent sequence identity of a given nucleic acid or amino acid sequence, A, to, with, or against a given nucleic acid or amino acid sequence, B, (which can alternatively be phrased as a given nucleic acid or amino acid sequence, A that has a certain percent sequence identity to, with, or against a given nucleic acid or amino acid sequence, B) is calculated as follows:

100 multiplied by (the fraction X/Y)
[0338] where X is the number of nucleotides or amino acids scored as identical matches by a sequence alignment program (e.g., BLAST) in that program's alignment of A and B, and where Y is the total number of nucleotides or amino acids in B. In some embodiments, sequence identity, for example, in homologues of proteins (as noted in Tables 6 and 7) will have at least about 40%, 50%, 60%, 70%, 80%, 85%, 90%, or even 95% or greater amino acid or nucleic acid sequence identity, alternatively at least about 75%, 76%, 77%, 78%, 79%, 80%, 81%, 82%, 83%, 84%, 85%, 86%, 87%, 88%, 89%, 90%, 91%, 92%, 93%, 94%, 95%, 96%, 97%, 98%, or 99% or greater amino acid sequence or nucleic acid identity, to a native sequence as disclosed herein.

### Identifying Therapeutics

[0339] As discussed herein, our experimental results identified targets such as genes and gene products associated with sensitive or resistant responses. Identifying agents that modulate such targets is accomplished using screening methodologies such as those described herein. In general, screening methods provide a straightforward means for selecting natural product extracts or compounds of interest from a large population which are further evaluated and condensed to a few active and selective materials. Constituents of this pool are then purified and evaluated for their therapeutic effects.

### Screening

[0340] As discussed herein, our experimental results identified targets such as genes and gene products associated with sensitive or resistant responses. Identifying agents that modulate such targets is accomplished using screening methodologies such as those described herein.

[0341] In general, screening methods provide a straightforward means for selecting natural product extracts or compounds of interest from a large population which are further evaluated and condensed to a few active and selective materials. Constituents of this pool are then purified and evaluated for their therapeutic effects.

### Compounds

[0342] In general, drugs are identified from libraries of both known compounds, natural product or synthetic (or semi-synthetic) extracts or chemical libraries according to methods known in the art. The screening method of the present invention is appropriate and useful for testing compounds from a variety of sources. The initial screens may be performed using a diverse library of compounds, but the method is suitable for a variety of other compounds and compound libraries. Such compound libraries can be combinatorial libraries, natural product libraries, or other small molecule libraries. In addition, compounds from commercial sources can be tested, as well as commercially available analogs of identified inhibitors.

[0343] For example, those skilled in the field of drug discovery and development will understand that the precise source of test extracts or compounds is not critical to the screening procedure(s) of the invention. Accordingly, virtually any number of chemical extracts or compounds can be screened using the methods described herein. Examples of such extracts or compounds include, but are not limited to, plant-, fungal-, prokaryotic- or animal-based extracts, fermentation broths, and synthetic compounds, as well as modification of existing compounds. Numerous methods are also available for generating random or directed synthesis (e.g., semi-synthesis or total synthesis) of any number of chemical compounds, including, but not limited to, saccharide-, lipid-, peptide-, and nucleic acid-based compounds.

[0344] In addition, those skilled in the art of drug discovery and development readily understand that methods for dereplication (e.g., taxonomic dereplication, biological dereplication, and chemical dereplication, or any combination thereof) or the elimination of replicates or repeats of materials already known for their activity should be employed whenever possible.

[0345] Since many of the compounds in libraries such as combinatorial and natural products libraries, as well as in natural products preparations, are not characterized, the screening methods of this invention provide novel compounds which are active as inhibitors or inducers in the particular screens, in addition to identifying known compounds which are active in the screens. Therefore, this invention includes such novel compounds, as well as the use of both novel and known compounds in pharmaceutical compositions and methods of treating.

[0346] There now follows a description a variety of therapeutics useful treating virtually any number of conditions described herein. Such therapeutics are illustrative and are not to be construed as limiting.

### Therapeutics

[0347] Antisense

[0348] Antisense nucleic acids typically suppress gene expression by inducing an RNAse-H-mediated degradation of a target nucleic acid or by sterically blocking the target sequence thereby eliminating reliance on steric blockage of a target sequence. Antisense nucleic acids capable of inducing an RNAse-H-mediated degradation of the target nucleic acid are typically polynucleotides. Antisense nucleic acids capable of sterically blocking a target sequence may be polynucleotides, PNAs, or morpholino nucleic acids. Approaches to designing antisense oligonucleotides are known in the art, see, e.g., US 2015/0031747.

[0349] In certain embodiments, an antisense nucleic acid has a nucleobase sequence that, when written in the 5′ to 3′ direction, comprises the reverse complement of the target segment of a target nucleic acid to which it is targeted.

[0350] In certain embodiments, the antisense nucleic acid has a total of 12 to 30 subunits in length. In other words, such antisense nucleic acids are from 12 to 30 linked subunits. In other embodiments, the antisense nucleic acid is 8 to 80, 12 to 50, 15 to 30, 18 to 24, 19 to 22, or 20 linked subunits. In certain such embodiments, the antisense nucleic acids are 8, 9, 10, 11, 12, 13, 14, 15, 16, 17, 18, 19, 20, 21, 22, 23, 24, 25, 26, 27, 28, 29, 30, 31, 32, 33, 34, 35, 36, 37, 38, 39, 40, 41, 42, 43, 44, 45, 46, 47, 48, 49, 50, 51, 52, 53, 54, 55, 56, 57, 58, 59, 60, 61, 62, 63, 64, 65, 66, 67, 68, 69, 70, 71, 72, 73, 74, 75, 76, 77, 78, 79, or 80 linked subunits in length, or a range defined by any two of the above values. In some embodiments the antisense nucleic acid is an antisense nucleic acid, and the linked subunits are nucleosides.

[0351] In certain embodiments, antisense nucleic acids targeted to a target nucleic acid may be shortened or truncated. For example, a single subunit may be deleted from the 5′ end (5′ truncation), or alternatively from the 3′ end (3′ truncation). A shortened or truncated antisense nucleic acid targeted to a target nucleic acid may have two subunits deleted from the 5′ end, or alternatively may have two subunits deleted from the 3′ end, of the antisense nucleic acid. Alternatively, the deleted nucleosides may be dispersed throughout the antisense nucleic acid, for example, in an antisense nucleic acid having one nucleoside deleted from the 5′ end and one nucleoside deleted from the 3′ end.

[0352] When a single additional subunit is present in a lengthened antisense nucleic acid, the additional subunit may be located at the 5′ or 3′ end of the antisense nucleic acid. When two or more additional subunits are present, the added subunits may be adjacent to each other; for example, in an antisense nucleic acid having two subunits added to the 5′ end (5′ addition), or alternatively to the 3′ end (3′ addition), of the antisense nucleic acid. Alternatively, the added subunits may be dispersed throughout the antisense nucleic acid, for example, in an antisense nucleic acid having one subunit added to the 5′ end and one subunit added to the 3′ end.

[0353] It is possible to increase or decrease the length of an antisense nucleic acid, such as an antisense nucleic acid, and/or introduce mismatch bases without eliminating activity. For example, in Woolf et al. (Proc. Natl. Acad. Sci. USA 89:7305-7309, 1992), a series of antisense nucleic acids 13-25 nucleobases in length were tested for their ability to induce cleavage of a target RNA in an oocyte injection model. Antisense nucleic acids 25 nucleobases in length with 8 or 11 mismatch bases near the ends of the antisense nucleic acids were able to direct specific cleavage of the target mRNA, albeit to a lesser extent than the antisense nucleic acids that contained no mismatches. Similarly, target specific cleavage was achieved using 13 nucleobase antisense nucleic acids, including those with 1 or 3 mismatches.

[0354] Gautschi et al. (J. Natl. Cancer Inst. 93:463-471, March 2001) demonstrated the ability of an oligonucleotide having 100% complementarity to the bcl-2 mRNA and having 3 mismatches to the bcl-xL mRNA to reduce the expression of both bcl-2 and bcl-xL in vitro and in vivo. Furthermore, this oligonucleotide demonstrated potent anti-tumor activity in vivo.

[0355] Maher and Dolnick (Nuc. Acid. Res. 16:3341-3358, 1988) tested a series of tandem 14 nucleobase antisense nucleic acids, and 28 and 42 nucleobase antisense nucleic acids comprised of the sequence of two or three of the tandem antisense nucleic acids, respectively, for their ability to arrest translation of human DHFR in a rabbit reticulocyte assay. Each of the three 14 nucleobase antisense nucleic acids alone was able to inhibit translation, albeit at a more modest level than the 28 or 42 nucleobase antisense nucleic acids.

[0356] In certain embodiments, antisense nucleic acids targeted to a target nucleic acid have chemically modified subunits arranged in patterns, or motifs, to confer to the antisense nucleic acids properties, such as enhanced inhibitory activity, increased binding affinity for a target nucleic acid, or resistance to degradation by in vivo nucleases.

[0357] Chimeric antisense nucleic acids typically contain at least one region modified so as to confer increased resistance to nuclease degradation, increased cellular uptake, increased binding affinity for the target nucleic acid, and/or increased inhibitory activity. A second region of a chimeric antisense nucleic acid may optionally serve as a substrate for the cellular endonuclease RNase H, which cleaves the RNA strand of an RNA:DNA duplex.

[0358] Antisense nucleic acids having a gapmer motif are considered chimeric antisense nucleic acids. In a gapmer, an internal region having a plurality of nucleotides that supports RNaseH cleavage is positioned between external regions having a plurality of nucleotides that are chemically distinct from the nucleosides of the internal region. In the case of an antisense nucleic acid having a gapmer motif, the gap segment generally serves as a substrate for endonuclease cleavage, while the wing segments comprise modified nucleosides. In certain embodiments, the regions of a gapmer are differentiated by the types of sugar moieties comprising each distinct region. The types of sugar moieties that are used to differentiate the regions of a gapmer may, in some embodiments, include β-D-ribonucleosides, β-D-deoxyribonucleosides, 2′-modified nucleosides (such 2′-modified nucleosides may include 2′-MOE, and 2′-O—CH₃, among others), and bicyclic sugar modified nucleosides (such bicyclic sugar modified nucleosides may include those having a 4′-(CH2)n-O-2′ bridge, where n=1 or n=2). Preferably, each distinct region comprises uniform sugar moieties. The wing-gap-wing motif is frequently described as “X—Y—Z”, where “X” represents the length of the 5′ wing region, “Y” represents the length of the gap region, and “Z” represents the length of the 3′ wing region. As used herein, a gapmer described as “X—Y—Z” has a configuration such that the gap segment is positioned immediately adjacent each of the 5′ wing segment and the 3′ wing segment. Thus, no intervening nucleotides exist between the 5′ wing segment and gap segment, or the gap segment and the 3′ wing segment. Any of the antisense nucleic acids described herein can have a gapmer motif. In some embodiments, X and Z are the same, in other embodiments they are different. In a preferred embodiment, Y is between 8 and 15 nucleotides. X, Y or Z can be any of 1, 2, 3, 4, 5, 6, 7, 8, 9, 10, 11, 12, 13, 14, 15, 16, 17, 18, 19, 20, 25, 30, or more nucleotides. Thus, gapmers described herein include, but are not limited to, for example, 5-10-5, 4-8-4, 4-12-3, 4-12-4, 3-14-3, 2-13-5, 2-16-2, 1-18-1, 3-10-3, 2-10-2, 1-10-1 or 2-8-2.

[0359] In certain embodiments, the antisense nucleic acid has a “wingmer” motif, having a wing-gap or gap-wing configuration, i.e. an X-Y or Y—Z configuration, as described above, for the gapmer configuration. Thus, wingmer configurations described herein include, but are not limited to, for example, 5-10, 8-4, 4-12, 12-4, 3-14, 16-2, 18-1, 10-3, 2-10, 1-10, 8-2, 2-13, or 5-13.

[0360] In certain embodiments, antisense nucleic acids targeted to a target nucleic acid possess a 5-10-5 gapmer motif.

[0361] In certain embodiments, antisense nucleic acids targeted to a target nucleic acid possess a 3-14-3 gapmer motif.

[0362] In certain embodiments, antisense nucleic acids targeted to a target nucleic acid possess a 2-13-5 gapmer motif.

[0363] In certain embodiments, antisense nucleic acids targeted to a target nucleic acid possess a 2-12-2 gapmer motif.

[0364] In certain embodiments, an antisense nucleic acid targeted to a target nucleic acid has a gap-widened motif.

[0365] In certain embodiments, a gap-widened antisense nucleic acid targeted to a target nucleic acid has a gap segment of fourteen 2′-deoxyribonucleotides positioned immediately adjacent to and between wing segments of three chemically modified nucleosides. In certain embodiments, the chemical modification comprises a 2′-sugar modification. In another embodiment, the chemical modification comprises a 2′-MOE sugar modification.

[0366] In certain embodiments, a gap-widened antisense nucleic acid targeted to a target nucleic acid has a gap segment of thirteen 2′-deoxyribonucleotides positioned immediately adjacent to and between a 5′ wing segment of two chemically modified nucleosides and a 3′ wing segment of five chemically modified nucleosides. In certain embodiments, the chemical modification comprises a 2′-sugar modification. In another embodiment, the chemical modification comprises a 2′-MOE sugar modification.

[0367] In certain embodiments, such oligonucleotides have a gap segment of 9, 10, or more linked deoxynucleosides. In certain embodiments, such gap segment is between two wing segments that independently have 1, 2, 3, 4, or 5 linked modified nucleosides. In certain embodiments, one or more modified nucleosides in the wing segment have a modified sugar. In certain embodiments, the modified sugar is a bicyclic sugar. In certain embodiments, the modified nucleoside is an LNA nucleoside. In certain embodiments, the modified nucleoside is a 2′-substituted nucleoside. In certain embodiments, 2′ substituted nucleosides include nucleosides with bicyclic sugar modifications. In certain embodiments, the modified nucleoside is a 2′-MOE nucleoside. In certain embodiments, the modified nucleoside is a constrained ethyl (cEt) nucleoside. In certain embodiments, the modified nucleoside is a F-HNA nucleoside. In certain embodiments, each modified nucleoside in each wing segment is independently a 2′-MOE nucleoside or a nucleoside with a bicyclic sugar modification such as a constrained ethyl (cEt) nucleoside or LNA nucleoside. In certain embodiments, each modified nucleoside in each wing segment is independently a 2′-MOE nucleoside, a nucleoside with a bicyclic sugar modification such as a constrained ethyl (cEt) nucleoside or LNA nucleoside, or a 2′-deoxyribonucleoside.

[0368] In certain embodiments, the compounds or compositions comprise a modified oligonucleotide consisting of 10 to 30 linked nucleosides and having a nucleobase sequence comprising at least 8, 9, 10, 11, 12, 13, 14, 15, 16, 17, 18, 19, or 20 contiguous nucleobases of any of nucleotides encoding the polypeptides described in Tables 6 ad 7. In certain embodiments, such oligonucleotides have a gap segment of 8, 9, 10, or more linked deoxynucleosides. In certain embodiments, such gap segment is between two wing segments that independently have 1, 2, 3, 4, 5, 6, 7, or 8 linked modified nucleosides. In certain embodiments, one or more modified nucleosides in the wing segment have a modified sugar. In certain embodiments, the modified sugar is a bicyclic sugar. In certain embodiments, the modified nucleoside is an LNA nucleoside. In certain embodiments, the modified nucleoside is a 2′-substituted nucleoside. In certain embodiments, 2′ substituted nucleosides include nucleosides with bicyclic sugar modifications. In certain embodiments, the modified nucleoside is a 2′-MOE nucleoside. In certain embodiments, the modified nucleoside is a constrained ethyl (cEt) nucleoside. In certain embodiments, the modified nucleoside is a F-HNA nucleoside. In certain embodiments, each modified nucleoside in each wing segment is independently a 2′-MOE nucleoside, a nucleoside with a bicyclic sugar modification such as a constrained ethyl (cEt) nucleoside or LNA nucleoside, or a 2′-deoxyribonucleoside.

[0369] In certain embodiments, the modified oligonucleotide is 16 nucleosides in length and has a gap segment of 9 linked nucleosides. In certain embodiments, the modified oligonucleotide is 16 nucleosides in length and has a gap segment of 10 linked nucleosides. In certain embodiments, the modified oligonucleotide is 20 nucleosides in length and has a gap segment of 10 linked nucleosides. In certain embodiments, the modified oligonucleotide has a wing segment on the 5′ end and 3′ end of the gap each independently having 1, 2, 3, 4, or 5 sugar modified nucleosides. In certain embodiments, each sugar modified nucleoside is independently a 2′-MOE nucleoside, a nucleoside with a bicyclic sugar moiety such as a constrained ethyl (cEt) nucleoside or LNA nucleoside, or a F-HNA nucleoside. In certain embodiments, each modified nucleoside in each wing segment is independently a 2′-MOE nucleoside, a nucleoside with a bicyclic sugar modification such as a constrained ethyl (cEt) nucleoside or LNA nucleoside, a 2′-deoxyribonucleoside, or a F-HNA nucleoside.

[0370] In certain embodiments, the compounds or compositions comprise a salt of the modified oligonucleotide.

[0371] In certain embodiments, the modified oligonucleotide comprises: a) a gap segment consisting of linked deoxynucleosides; b) a 5′ wing segment consisting of linked nucleosides; and c) a 3′ wing segment consisting of linked nucleosides. The gap segment is positioned between the 5′ wing segment and the 3′ wing segment and each nucleoside of each wing segment comprises a modified sugar.

[0372] In certain embodiments, the modified oligonucleotide consists of 16 linked nucleosides, the gap segment consisting of 10 linked deoxynucleosides, the 5′ wing segment consisting of three linked nucleosides, the 3′ wing segment consisting of three linked nucleosides, each nucleoside of each wing segment comprises a 2′-O-methoxyethyl sugar and/or a constrained ethyl (cEt) sugar, each internucleoside linkage is a phosphorothioate linkage and each cytosine is a 5-methylcytosine. In some aspects, each of the three linked nucleosides of the 5′ wing segment is a 2′-O-methoxyethyl nucleoside and each of the three linked nucleosides of the 3′ wing segment is a constrained ethyl (cEt) nucleoside. In other aspects, the three linked nucleosides of the 5′ wing segment are a 2′-O-methoxyethyl nucleoside, a constrained ethyl (cEt) nucleoside, and a constrained ethyl (cEt) nucleoside in the 5′ to 3′ direction, and the three linked nucleosides of the 3′ wing segment are a constrained ethyl (cEt) nucleoside, a constrained ethyl (cEt) nucleoside, and a 2′-O-methoxyethyl nucleoside in the 5′ to 3′ direction. In other aspects, the three linked nucleosides of the 5′ wing segment are a 2′-O-methoxyethyl nucleoside, 2′-O-methoxyethyl nucleoside, and a constrained ethyl (cEt) nucleoside in the 5′ to 3′ direction, and the three linked nucleosides of the 3′ wing segment are a constrained ethyl (cEt) nucleoside, a constrained ethyl (cEt) nucleoside, and a 2′-O-methoxyethyl nucleoside in the 5′ to 3′ direction.

[0373] In certain embodiments, the modified oligonucleotide consists of 16 linked nucleosides, the gap segment consisting of 10 linked deoxynucleosides, the 5′ wing segment consisting of one nucleoside, the 3′ wing segment consisting of five linked nucleosides, each nucleoside of each wing segment comprises a 2′-O-methoxyethyl sugar and/or a constrained ethyl (cEt) sugar, each internucleoside linkage is a phosphorothioate linkage and each cytosine is a 5-methylcytosine. In some aspects, the nucleoside of the 5′ wing segment is a constrained ethyl (cEt) nucleoside and the five linked nucleosides of the 3′ wing segment are a constrained ethyl (cEt) nucleoside, 2′-O-methoxyethyl nucleoside, a constrained ethyl (cEt) nucleoside, a 2′-O-methoxyethyl nucleoside, and a 2′-O-methoxyethyl nucleoside in the 5′ to 3′ direction.

[0374] In certain embodiments, the modified oligonucleotide consists of 16 linked nucleosides, the gap segment consisting of 9 linked deoxynucleosides, the 5′ wing segment consisting of five linked nucleosides, the 3′ wing segment consisting of two linked nucleosides, each nucleoside of each wing segment comprises a 2′-O-methoxyethyl sugar, a 2′-deoxyribose, and/or a constrained ethyl (cEt) sugar, each internucleoside linkage is a phosphorothioate linkage and each cytosine is a 5-methylcytosine. In some aspects, the five linked nucleosides of the 5′ wing segment are a constrained ethyl (cEt) nucleoside, a 2′-deoxynucleoside, a constrained ethyl (cEt) nucleoside, a 2′-deoxynucleoside, and a constrained ethyl (cEt) sugar and the two linked nucleosides of the 3′ wing segment are a 2′-O-methoxyethyl nucleoside and a 2′-O-methoxyethyl sugar in the 5′ to 3′ direction.

[0375] In some embodiments, hybridization occurs between an antisense nucleic acid disclosed herein and a target nucleic acid. The most common mechanism of hybridization involves hydrogen bonding (e.g., Watson-Crick, Hoogsteen or reversed Hoogsteen hydrogen bonding) between complementary nucleobases of the nucleic acid molecules.

[0376] Hybridization can occur under varying conditions. Stringent conditions are sequence-dependent and are determined by the nature and composition of the nucleic acid molecules to be hybridized.

[0377] Methods of determining whether a sequence is specifically hybridizable to a target nucleic acid are well known in the art. In certain embodiments, the antisense nucleic acids provided herein are specifically hybridizable with a target nucleic acid.

[0378] An antisense nucleic acid and a target nucleic acid are complementary to each other when a sufficient number of nucleobases of the antisense nucleic acid can hydrogen bond with the corresponding nucleobases of the target nucleic acid, such that a desired effect will occur (e.g., antisense inhibition of a target nucleic acid, such as a target nucleic acid).

[0379] Noncomplementary nucleobases between an antisense nucleic acid and a target nucleic acid may be tolerated provided that the antisense nucleic acid remains able to specifically hybridize to a target nucleic acid. Moreover, an antisense nucleic acid may hybridize over one or more segments of a target nucleic acid such that intervening or adjacent segments are not involved in the hybridization event (e.g., a loop structure, mismatch or hairpin structure).

[0380] In certain embodiments, the antisense nucleic acids provided herein, or a specified portion thereof, are, or are at least, 70%, 80%, 85%, 86%, 87%, 88%, 89%, 90%, 91%, 92%, 93%, 94%, 95%, 96%, 97%, 98%, 99%, or 100% complementary to a target nucleic acid, a target region, target segment, or specified portion thereof. Percent complementarity of an antisense nucleic acid with a target nucleic acid can be determined using routine methods.

[0381] For example, an antisense nucleic acid in which 18 of 20 nucleobases of the antisense nucleic acid are complementary to a target region, and would therefore specifically hybridize, would represent 90 percent complementarity. In this example, the remaining noncomplementary nucleobases may be clustered or interspersed with complementary nucleobases and need not be contiguous to each other or to complementary nucleobases. As such, an antisense nucleic acid which is 18 nucleobases in length having 4 (four) noncomplementary nucleobases which are flanked by two regions of complete complementarity with the target nucleic acid would have 77.8% overall complementarity with the target nucleic acid and would thus fall within the scope of the present invention. Percent complementarity of an antisense nucleic acid with a region of a target nucleic acid can be determined routinely using BLAST programs (basic local alignment search tools) and PowerBLAST programs known in the art (Altschul et al., J. Mol. Biol., 1990, 215, 403 410; Zhang and Madden, Genome Res., 1997, 7, 649 656). Percent homology, sequence identity or complementarity can be determined by, for example, the Gap program (Wisconsin Sequence Analysis Package, Version 8 for Unix, Genetics Computer Group, University Research Park, Madison Wis.), using default settings, which uses the algorithm of Smith and Waterman (Adv. Appl. Math., 1981, 2, 482 489).

[0382] In certain embodiments, the antisense nucleic acids provided herein, or specified portions thereof, are fully complementary (i.e. 100% complementary) to a target nucleic acid, or specified portion thereof. For example, an antisense nucleic acid may be fully complementary to a target nucleic acid, or a target region, or a target segment or target sequence thereof. As used herein, “fully complementary” means each nucleobase of an antisense nucleic acid is capable of precise base pairing with the corresponding nucleobases of a target nucleic acid. For example, a 20 nucleobase antisense nucleic acid is fully complementary to a target sequence that is 400 nucleobases long, so long as there is a corresponding 20 nucleobase portion of the target nucleic acid that is fully complementary to the antisense nucleic acid. Fully complementary can also be used in reference to a specified portion of the first and/or the second nucleic acid. For example, a 20 nucleobase portion of a 30 nucleobase antisense nucleic acid can be “fully complementary” to a target sequence that is 400 nucleobases long. The 20 nucleobase portion of the 30 nucleobase oligonucleotide is fully complementary to the target sequence if the target sequence has a corresponding 20 nucleobase portion wherein each nucleobase is complementary to the 20 nucleobase portion of the antisense nucleic acid. At the same time, the entire 30 nucleobase antisense nucleic acid may or may not be fully complementary to the target sequence, depending on whether the remaining 10 nucleobases of the antisense nucleic acid are also complementary to the target sequence.

[0383] The location of a non-complementary nucleobase may be at the 5′ end or 3′ end of the antisense nucleic acid. Alternatively, the non-complementary nucleobase or nucleobases may be at an internal position of the antisense nucleic acid. When two or more non-complementary nucleobases are present, they may be contiguous (i.e. linked) or non-contiguous. In one embodiment, a non-complementary nucleobase is located in the wing segment of a gapmer antisense nucleic acid.

[0384] In certain embodiments, antisense nucleic acids that are, or are up to 12, 13, 14, 15, 16, 17, 18, 19, or nucleobases in length comprise no more than 4, no more than 3, no more than 2, or no more than 1 non-complementary nucleobase(s) relative to a target nucleic acid, such as a target nucleic acid, or specified portion thereof.

[0385] In certain embodiments, antisense nucleic acids that are, or are up to 12, 13, 14, 15, 16, 17, 18, 19, 20, 21, 22, 23, 24, 25, 26, 27, 28, 29, or 30 nucleobases in length comprise no more than 6, no more than 5, no more than 4, no more than 3, no more than 2, or no more than 1 non-complementary nucleobase(s) relative to a target nucleic acid, such as a target nucleic acid, or specified portion thereof.

[0386] The antisense nucleic acids provided herein also include those which are complementary to a portion of a target nucleic acid. As used herein, “portion” refers to a defined number of contiguous (i.e. linked) nucleobases within a region or segment of a target nucleic acid. A “portion” can also refer to a defined number of contiguous nucleobases of an antisense nucleic acid. In certain embodiments, the antisense nucleic acids are complementary to at least an 8 nucleobase portion of a target segment. In certain embodiments, the antisense nucleic acids are complementary to at least a 12 nucleobase portion of a target segment. In certain embodiments, the antisense nucleic acids are complementary to at least a 15 nucleobase portion of a target segment. Also contemplated are antisense nucleic acids that are complementary to at least a 9, 10, 11, 12, 13, 14, 15, 16, 17, 18, 19, 20, or more nucleobase portion of a target segment, or a range defined by any two of these values.

[0387] The antisense nucleic acids provided herein may also have a defined percent identity to a particular target or a portion thereof. As used herein, an antisense nucleic acid is identical to the sequence disclosed herein if it has the same nucleobase pairing ability. For example, a RNA which contains uracil in place of thymidine in a disclosed DNA sequence would be considered identical to the DNA sequence since both uracil and thymidine pair with adenine. Shortened and lengthened versions of the antisense nucleic acids described herein as well as compounds having non-identical bases relative to the antisense nucleic acids provided herein also are contemplated. The non-identical bases may be adjacent to each other or dispersed throughout the antisense nucleic acid. Percent identity of an antisense nucleic acid is calculated according to the number of bases that have identical base pairing relative to the sequence to which it is being compared.

[0388] In certain embodiments, the antisense nucleic acids, or portions thereof, are at least 70%, 75%, 80%, 85%, 90%, 95%, 96%, 97%, 98%, 99% or 100% identical to one or more antisense nucleic acids designed in view of the genes expressing one or more of the polypeptides described in Table 6 or 7, or a portion thereof.

[0389] In certain embodiments, a portion of the antisense nucleic acid is compared to an equal length portion of the target nucleic acid. In certain embodiments, an 8, 9, 10, 11, 12, 13, 14, 15, 16, 17, 18, 19, 20, 21, 22, 23, 24, or 25 nucleobase portion is compared to an equal length portion of the target nucleic acid.

[0390] In certain embodiments, a portion of the antisense nucleic acid is compared to an equal length portion of the target nucleic acid. In certain embodiments, an 8, 9, 10, 11, 12, 13, 14, 15, 16, 17, 18, 19, 20, 21, 22, 23, 24, or 25 nucleobase portion is compared to an equal length portion of the target nucleic acid.

[0391] A nucleoside is a base-sugar combination. The nucleobase (also known as base) portion of the nucleoside is normally a heterocyclic base moiety. Nucleotides are nucleosides that further include a phosphate group covalently linked to the sugar portion of the nucleoside. For those nucleosides that include a pentofuranosyl sugar, the phosphate group can be linked to the 2′, 3′ or 5′ hydroxyl moiety of the sugar. Oligonucleotides are formed through the covalent linkage of adjacent nucleosides to one another, to form a linear polymeric oligonucleotide. Within the oligonucleotide structure, the phosphate groups are commonly referred to as forming the internucleoside linkages of the oligonucleotide.

[0392] Modifications to antisense nucleic acids encompass substitutions or changes to internucleoside linkages, sugar moieties, or nucleobases. Modified antisense nucleic acids are often preferred over native forms because of desirable properties such as, for example, enhanced cellular uptake, enhanced affinity for nucleic acid target, increased stability in the presence of nucleases, or increased inhibitory activity.

[0393] Chemically modified nucleosides may also be employed to increase the binding affinity of a shortened or truncated antisense nucleic acid for its target nucleic acid. Consequently, comparable results can often be obtained with shorter antisense nucleic acids that have such chemically modified nucleosides.

[0394] siRNA

[0395] siRNA nucleic acids are nucleic acids that predominantly rely on RISC-mediated transcript degradation. Typically, siRNA is a hybridized polynucleotide having a passenger strand and a guide strand, each of the strands having 16-26 contiguous nucleotides. An siRNA may include one or two 3′ overhangs (e.g., 2-nucleotide-long overhangs), or an siRNA may have one blunt end (where the 3′-end of the guide strand is hybridized to the 5′-end of the passenger strand). Approaches to desigining siRNAs are known in the art, see, e.g., U.S. Pat. No. 9,234,196. siRNA design tools are available for siRNA sequence selection, e.g., the design tools available from Integrated DNA Technologies, Inc. (idtdna.com), DHARMACON (dharmacon.horizondiscovery.com), or ThermoFisher Scientific (rnaidesigner.thermofisher.com).

[0396] The siRNAs of the compositions featured herein include an RNA strand (the antisense strand) having a region which is less than 30 nucleotides in length, generally 19-24 nucleotides in length, and is substantially complementary to at least part of a target mRNA transcript. The use of these siRNAs provides for the targeted degradation of mRNAs of target genes. Low dosages of siRNAs in particular can specifically and efficiently mediate RNAi, resulting in inhibition of expression of a target gene. Methods and compositions including siRNAs may be useful for diseases described herein.

[0397] The methods and compositions containing an siRNA may be useful for treating pathological processes mediated by the target gene expression. In an embodiment, method described herein may include administering to a mammal in need thereof a therapeutically effective amount of an siRNA targeted to the target gene. In an embodiment, an siRNA is administered to the mammal at 0.01 to 25 mg/kg (e.g., about 0.01, 0.1, 0.5, 1.0, 2, 2.5, 3, 4, 5, 6, 7, 8, 9, 10, 11, 12, 13, 14, 15, 16, 17, 18, 19, 20, 21, 22, 23, 24, or 25 mg/kg).

[0398] The following detailed description discloses how to make and use the compositions containing siRNAs to inhibit the expression of a target gene, as well as compositions and methods for treating diseases and disorders caused by the expression of this gene. The compositions described herein may include an siRNA having an antisense strand comprising a region of complementarity which is less than 30 nucleotides in length, generally 19-24 nucleotides in length, and is substantially complementary to at least part of an RNA transcript of a target gene, together with a pharmaceutically acceptable carrier. The siRNA may have an antisense strand having a region of complementarity which is less than 30 nucleotides in length, generally 19-24 nucleotides in length, and is substantially complementary to at least part of an RNA transcript of a target gene.

[0399] The sense strand of an siRNA may include, e.g., 15, 16, 17, 18, 19, 20, 21, or more contiguous nucleotides of the target gene.

[0400] In an embodiment, an siRNA can include at least 1, 2, 3, 4, 5, 6, 7, 8, 9, 10, or more modified nucleotides.

[0401] In an embodiment, a modified nucleotide can include a 2′-O-methyl modified nucleotide, a nucleotide comprising a 5′-phosphorothioate group, and/or a terminal nucleotide linked to a cholesteryl derivative or dodecanoic acid bisdecylamide group. In an embodiment, a modified nucleotide can include a 2′-deoxy-2′-fluoro modified nucleotide, a 2′-deoxy-modified nucleotide, a locked nucleotide, an abasic nucleotide, 2′-amino-modified nucleotide, 2′-alkyl-modified nucleotide, morpholino nucleotide, a phosphoramidate, and/or a non-natural base comprising nucleotide.

[0402] In an embodiment, the region of complementary of a siRNA is at least 10, 11, 12, 13, 14, 15, 16, 17, 18, 19, 20, 21, or more nucleotides in length. In an embodiment, the region of complementary includes 10, 11, 12, 13, 14, 15, 16, 17, 18, 19, 20, 21, or more contiguous nucleotides of the target gene.

[0403] In an embodiment, each strand of a siRNA is 15, 16, 17, 18, 19, 20, 21, 22, 23, 24, 25, 26, 27, 28, 29, 30 or more nucleotides in length.

[0404] In an embodiment, administration of a siRNA to a cell results in about 40%, 45%, 50%, 55%, 60%, 65%, 70%, 75%, 80%, 90%, 95% or more inhibition of the target mRNA expression as measured by a real time PCR assay. In an embodiment, administration of a siRNA to a cell results in about 40% to 45%, 45% to 50%, 50% to 55%, 55% to 60%, 60% to 65%, 65% to 70%, 70% to 75%, 75% to 80%, 80% to 85%, 85% to 90%, 90% to 95% or more inhibition of the target mRNA expression as measured by a real time PCR assay. In an embodiment, administration of a siRNA to a cell results in about 40%, 45%, 50%, 55%, 60%, 65%, 70%, 75%, 80%, 90%, 95% or more inhibition of the target mRNA expression as measured by a branched DNA assay. In an embodiment, administration of a siRNA to a cell results in about 40% to 45%, 45% to 50%, 50% to 55%, 55% to 60%, 60% to 65%, 65% to 70%, 70% to 75%, 75% to 80%, 80% to 85%, 85% to 90%, 90% to 95% or more inhibition of the target mRNA expression as measured by a branched DNA assay.

[0405] In an embodiment, a siRNA has an IC50 of less than 0.01 pM, 0.1 pM, 1 pM, 5 pM, 10 pM, 100 pM, or 1000 pM.

[0406] In an embodiment, administration of a siRNA can reduce the target mRNA by about 40%, 45%, 50%, 55%, 60%, 65%, 70%, 75%, 80%, 90%, 95% or more in cynomolgus monkeys. In an embodiment, administration of a siRNA reduces the target mRNA levels by about 40%, 45%, 50%, 55%, 60%, 65%, 70%, 75%, 80%, 90%, 95% or more or serum target protein levels by about 40%, 45%, 50%, 55%, 60%, 65%, 70%, 75%, 80%, 90%, 95% or more. In an embodiment, administration of a siRNA reduces liver target mRNA levels and/or serum target protein levels up to 1, 2, 3, 4, 5, 6, 7, 8, 9, 10, 11, 12, 13, 14, 15, 16, 17, 18, 19, 20, 21, 22, 23, 24, 25, or more days.

[0407] Accordingly, in some aspects, pharmaceutical compositions containing an siRNA and a pharmaceutically acceptable carrier, methods of using the compositions to inhibit expression of a target gene, and methods of using the pharmaceutical compositions to treat diseases caused by expression of a target gene are featured.

[0408] Gene Editing—CRISPR

[0409] In general, “CRISPR system” refers collectively to transcripts and other elements involved in the expression of or directing the activity of CRISPR-associated (“Cas”) genes, including sequences encoding a Cas gene, a tracr (trans-activating CRISPR) sequence (e.g. tracrRNA or an active partial tracrRNA), a tracr-mate sequence (encompassing a “direct repeat” and a tracrRNA-processed partial direct repeat in the context of an endogenous CRISPR system), a guide sequence (also referred to as a “spacer” in the context of an endogenous CRISPR system), or other sequences and transcripts from a CRISPR locus. In some embodiments, one or more elements of a CRISPR system is derived from a type I, type II, or type III CRISPR system. In some embodiments, one or more elements of a CRISPR system is derived from a particular organism comprising an endogenous CRISPR system, such as Streptococcus pyogenes. In general, a CRISPR system is characterized by elements that promote the formation of a CRISPR complex at the site of a target sequence (also referred to as a protospacer in the context of an endogenous CRISPR system). In the context of formation of a CRISPR complex, “target sequence” refers to a sequence to which a guide sequence is designed to have complementarity, where hybridization between a target sequence and a guide sequence promotes the formation of a CRISPR complex. Full complementarity is not necessarily required, provided there is sufficient complementarity to cause hybridization and promote formation of a CRISPR complex. A target sequence may comprise any polynucleotide, such as DNA or RNA polynucleotides. In some embodiments, a target sequence is located in the nucleus or cytoplasm of a cell. In some embodiments, the target sequence may be within an organelle of a eukaryotic cell. A sequence or template that may be used for recombination into the targeted locus comprising the target sequences is referred to as an “editing template” or “editing polynucleotide” or “editing sequence”. In aspects of the invention, an exogenous template polynucleotide may be referred to as an editing template. In an aspect of the invention the recombination is homologous recombination.

[0410] In particular, the methods described herein may utilize CRISPR/Cas9 system or CRISPR/Cpf1 system. The methods disclosed herein may be used for altering the target gene. A target gene can be altered (e.g., corrected) by gene editing, e.g., using the CRISPR system. The alteration (e.g., correction) of the target gene can be mediated by any mechanism. Exemplary mechanisms that can be associated with the alteration (e.g., correction) of the mutant gene include, but are not limited to, non-homologous end joining (e.g., classical or alternative), microhomology-mediated end joining (MMEJ), homology-directed repair (e.g., endogenous donor template mediated), SDSA (synthesis dependent strand annealing), single strand annealing, or single strand invasion.

[0411] For example, the methods and compositions disclosed herein, e.g., a Cas9 or Cpf1 molecule complexed with a gRNA molecule, can be used to target a specific location in a target DNA. Depending on the Cas9 or Cpf1 molecule/gRNA molecule complex used in the methods and compositions, specific editing of a target nucleic acid can be effected.

[0412] The CRISPR system typically utilizes a guide RNA (gRNA) for gene editing. The system is targeted to the target sequence by hybridization to crRNA or spacer (e.g., as part of gRNA), which binds to the targeted DNA through base complementarity and provides for precise DNA cleavage. This cleavage is then repaired via various pathways, which can be exploited for different outcomes. Knockouts can be achieved through error prone repair via the Non-homologous End Joining (NHEJ) pathway, which can introduce mutations and disrupt gene function. Targeted integration of a sequence (called a knock-in) can be achieved via the Homology Directed Repair (HDR) pathway, which uses a provided DNA template to repair the cleavage. Activation or repression of a gene can be achieved by targeting catalytically inert Cas9 fused to a transcription activator or repressor to the promoter. gRNA typically includes a spacer and a scaffold, where the former defines the target and the latter is used for Cas-binding. The spacer typically includes about 20 nucleotides complementary to a genomic sequence target. Approaches to designing CRISPR systems are known in the art, see, e.g., U.S. Pat. Nos. 8,697,359 and 10,253,312 and in US 2015/0232881 and US 2018/0187176. gRNA design tools are available for gRNA sequence selection, e.g., at crispr.mit.edu, atum.bio, e-crisp.org, or from ThermoFisher Scientific (thermofisher.com).

[0413] Typically, a CRISPR system is introduced into a cell containing and expressing a DNA molecule having a target sequence and encoding the target gene product. Typically, a CRISPR system includes:
[0414] a) gRNA that hybridizes to the target gene sequence, and
[0415] b) a Cas9 or Cpf1 molecule.

[0416] Component (a) may be provided as a first regulatory element operable in a eukaryotic cell operably linked to at least one nucleotide sequence encoding a CRISPR-Cas system gRNA that hybridizes with the target sequence.

[0417] Component (b) may be provided as a second regulatory element operable in a eukaryotic cell operably linked to a nucleotide sequence encoding a Cas9 or Cpf1 molecule

[0418] Components (a) and (b) may be located on the same or different vectors of the system, whereby the gRNA targets the target sequence and the Cas9 or Cpf1 protein cleaves the DNA molecule, whereby expression of the at least one gene product is altered; and, wherein the Cas9 protein and the guide RNA do not naturally occur together.

[0419] A gRNA molecule, as that term is used herein, may refer to a nucleic acid that promotes the specific targeting or homing of a gRNA molecule/Cas9 molecule complex to a target nucleic acid. gRNA molecules can be unimolecular (having a single RNA molecule), sometimes referred to herein as “chimeric” gRNAs, or modular (comprising more than one, and typically two, separate RNA molecules). A gRNA molecule comprises a number of domains. The gRNA molecule domains are described in more detail below. Typically, gRNA will incorporate the functions or structure of both crRNA and tracrRNA, e.g., the functions of processed or mature crRNA and of processed or mature tracrRNA. Chimieric or unimolecular gRNA molecules can have a single RNA molecule, e.g., which incorporates both crRNA function or structure and the tracrRNA function or structure. A modular gRNA molecule can comprise a RNA molecule that incorporates the crRNA function or structure another that incorporates the tracrRNA function or structure.

[0420] For CRISPR/Cpf1, crRNA may be used as a gRNA. The Cpf1 protein forms a complex with a single stranded RNA oligonucleotide to mediate targeted DNA cleavage. The single strand guide RNA oligonucleotide consists of a constant region of 20 nt and a target region of 21-24 nt for an overall length of 41-44 nt.

[0421] Antibodies

[0422] The term “antibody,” as used herein, refers to a monoclonal or polyclonal antibody. A monoclonal antibody includes at least the variable domain of a heavy chain, and normally comprises at least the variable domains of a heavy chain and of a light chain of an immunoglobulin, which bind to an antigen of interest. Antibodies and antigen-binding fragments include, but are not limited to, polyclonal, monoclonal, multispecific, human, humanized, primatized, or chimeric antibodies, single chain antibodies, epitope-binding fragments, e.g., Fab, Fab′ and F(ab′)₂, Fd, Fvs, single-chain Fvs (scFv), single-chain antibodies, disulfide-linked Fvs (sdFv), fragments comprising either a V_{L} or V_{H} domain, fragments produced by a Fab expression library, and anti-idiotypic (anti-Id) antibodies. Antibody molecules of the invention can be of any type (e.g., IgG, IgE, IgM, IgD, IgA, and IgY), class (e.g., IgG1, IgG2, IgG3, IgG4, IgA1 and IgA2) or subclass of immunoglobulin molecule.

[0423] An agent of the invention may be an antibody or an antigen-binding fragment thereof. The making and use of therapeutic antibodies against a target antigen (e.g., target gene product) is known in the art. See, e.g., Zhiqiang AN (Editor), Therapeutic Monoclonal Antibodies: From Bench to Clinic. 1st Edition. Wiley 2009, and also Greenfield (Ed.), Antibodies: A Laboratory Manual. (Second edition) Cold Spring Harbor Laboratory Press 2013, for methods of making recombinant antibodies, including antibody engineering, use of degenerate oligonucleotides, 5′-RACE, phage display, and mutagenesis; antibody testing and characterization; antibody pharmacokinetics and pharmacodynamics; antibody purification and storage; and screening and labeling techniques.

[0424] Proteins

[0425] Any of the proteins described herein as well as any analog or fragment useful as therapeutics. Such proteins also include all mRNA processing variants (e.g., all products of alternative splicing or differential promoter utilization). Specific fragments or analogues of interest include full-length or partial proteins including an amino acid sequence which differs only by conservative amino acid substitutions, for example, substitution of one amino acid for another of the same class (e.g., valine for glycine, arginine for lysine, etc.) or by one or more non-conservative amino acid substitutions, deletions, or insertions located at positions of the amino acid sequence which do not destroy the proteins biological activity. Analogs also include proteins which are modified for the purpose of increasing peptide stability; such analogs may contain, e.g., one or more desaturated peptide bonds or D-amino acids in the peptide sequence or the peptide may be formulated as a cyclized peptide molecule.

[0426] Cell Therapies

[0427] Using the compositions and methods of the disclosure, a cell (e.g., a human cell) can be modified so as to express a therapeutic gene or gene products and subsequently administered to a subject, such as a subject described herein. Alternatively, or additionally, a cell that expresses one or more gene targets may be induced to replicate ex vivo, and subsequently administered to a subject. Still further, a cell may be induced to differentiate ex vivo into a form that expresses on or more gene targets, and subsequently administered to a subject.

[0428] Accordingly, various methodologies can be used to genetically engineer a cell so as to express a desired product. For example, a cell (e.g., a human cell) can be transduced ex vivo to express a desired gene or protein by contacting the cell with a viral vector that encodes the desired target. Viral genomes provide a rich source of vectors that can be used for the efficient delivery of exogenous genes into a cell. Viral genomes are particularly useful vectors for gene delivery, as the polynucleotides contained within such genomes may often be incorporated into the nuclear genome of the target cell, for example, by way of generalized or specialized transduction. These processes occur as part of the natural viral replication cycle, and often do not require added proteins or reagents in order to induce gene integration. Examples of viral vectors that may be used to transduce a cell described herein include, without limitation, a retrovirus, adenovirus (e.g., Ad5, Ad26, Ad34, Ad35, and Ad48), parvovirus, coronavirus, negative strand RNA viruses such as orthomyxovirus (e.g., influenza virus), rhabdovirus (e.g., rabies and vesicular stomatitis virus), paramyxovirus (e.g. measles and Sendai), positive strand RNA viruses, such as picornavirus and alphavirus, and double stranded DNA viruses including adenovirus, herpesvirus (e.g., Herpes Simplex virus types 1 and 2, Epstein-Barr virus, cytomegalovirus), and poxvirus (e.g., vaccinia, modified vaccinia Ankara (MVA), fowlpox and canarypox). Other viruses that may be used to transduce a cell described herein include Norwalk virus, togavirus, flavivirus, papovavirus, hepadnavirus, human papilloma virus, human foamy virus, and hepatitis virus, for example. Examples of retroviruses that may be used to transduce a cell described herein include, without limitation, avian leukosis-sarcoma, avian C-type viruses, mammalian C-type, B-type viruses, D-type viruses, oncoretroviruses, HTLV-BLV group, lentivirus, alpharetrovirus, and gammaretrovirus, spumavirus. Other examples are murine leukemia viruses, murine sarcoma viruses, mouse mammary tumor virus, bovine leukemia virus, feline leukemia virus, feline sarcoma virus, avian leukemia virus, human T-cell leukemia virus, baboon endogenous virus, Gibbon ape leukemia virus, Mason Pfizer monkey virus, simian immunodeficiency virus, simian sarcoma virus, and Rous sarcoma virus.

[0429] Another useful tool for the modification of a target cell (e.g., a human cell) to express a desired gene or protein is the clustered regularly interspaced short palindromic repeats (CRISPR)/Cas system, a system that originally evolved as an adaptive defense mechanism in bacteria and archaea against viral infection. The CRISPR/Cas system utilizes palindromic repeat sequences within plasmid DNA, along with a CRISPR-associated protein (Cas; e.g., Cas9 or Cas12a), to cleave endogenous nucleic acids and facilitate the insertion of a gene of interest into a target cell genome. The CRISPR/Cas ensemble of DNA and protein directs site specific DNA cleavage of a target sequence by first incorporating foreign DNA into CRISPR loci. Polynucleotides containing these foreign sequences and the repeat-spacer elements of the CRISPR locus are, in turn, transcribed in a host cell to create a guide RNA, which can subsequently anneal to a target sequence and localize the Cas nuclease to this site. One can design site-specific CRISPR/Cas constructs because the interaction that brings the Cas nuclease within close proximity of the target DNA molecule is governed by RNA:DNA hybridization. As a result, one can design a CRISPR/Cas system to cleave any target DNA molecule of interest. This technique has been exploited in order to edit eukaryotic genomes (Hwang et al. Nature Biotechnology 31:227 (2013), the disclosure of which is incorporated herein by reference) and can be used as an efficient means of site-specifically editing cells described herein so as to express a gene of interest.

[0430] Additionally or alternatively, a cell of the disclosure (e.g., a human cell) may be modified ex vivo so as to express a desired gene or protein by contacting the cell with a polynucleotide containing the desired gene or encoding the desired protein, for example, under conditions that promote the uptake of the polynucleotide by the cell. Examples of such methods include, without limitation, calcium phosphate precipitation, electroporation, microinjection, infection, and lipofection. Such methods are described in more detail, for example, in Green et al., Molecular Cloning: A Laboratory Manual, Fourth Edition (Cold Spring Harbor University Press, New York (2014)); and Ausubel et al., Current Protocols in Molecular Biology (John Wiley & Sons, New York (2015)), the disclosures of each of which are incorporated herein by reference.

[0431] Recognition and binding of the polynucleotide encoding one or more therapeutic proteins of the disclosure by mammalian RNA polymerase is important for gene expression. As such, one may include sequence elements within the polynucleotide that exhibit a high affinity for transcription factors that recruit RNA polymerase and promote the assembly of the transcription complex at the transcription initiation site. Such sequence elements include, e.g., a mammalian promoter, the sequence of which can be recognized and bound by specific transcription initiation factors and ultimately RNA polymerase. Examples of mammalian promoters have been described in Smith et al., Mol. Sys. Biol., 3:73, online publication, the disclosure of which is incorporated herein by reference.

[0432] Once a polynucleotide encoding one or more therapeutic proteins has been incorporated into the nuclear DNA of a mammalian cell, transcription of this polynucleotide can be induced by methods known in the art. For example, expression can be induced by exposing the mammalian cell to an external chemical reagent, such as an agent that modulates the binding of a transcription factor and/or RNA polymerase to the mammalian promoter and thus regulates gene expression. The chemical reagent can serve to facilitate the binding of RNA polymerase and/or transcription factors to the mammalian promoter, e.g., by removing a repressor protein that has bound the promoter. Alternatively, the chemical reagent can serve to enhance the affinity of the mammalian promoter for RNA polymerase and/or transcription factors such that the rate of transcription of the gene located downstream of the promoter is increased in the presence of the chemical reagent. Examples of chemical reagents that potentiate polynucleotide transcription by the above mechanisms are tetracycline and doxycycline. Such reagents are commercially available and can be administered to a mammalian cell in order to promote gene expression according to established protocols.

[0433] Other DNA sequence elements that may be included in polynucleotides for use in the compositions and methods described herein are enhancer sequences. Enhancers represent another class of regulatory elements that induce a conformational change in the polynucleotide containing the gene of interest such that the DNA adopts a three-dimensional orientation that is favorable for binding of transcription factors and RNA polymerase at the transcription initiation site. Thus, polynucleotides for use in the compositions and methods described herein include those that encode one or more therapeutic proteins and additionally include a mammalian enhancer sequence. Many enhancer sequences are now known from mammalian genes, and examples are enhancers from the genes that encode mammalian globin, elastase, albumin, α-fetoprotein, and insulin. Enhancers for use in the compositions and methods described herein also include those that are derived from the genetic material of a virus capable of infecting a eukaryotic cell. Examples are the SV40 enhancer on the late side of the replication origin (bp 100-270), the cytomegalovirus early promoter enhancer, the polyoma enhancer on the late side of the replication origin, and adenovirus enhancers. Additional enhancer sequences that induce activation of eukaryotic gene transcription are disclosed in Yaniv et al., Nature 297:17 (1982).

[0434] In other embodiments, expression may be constitutive. Such constructs are engineered according to methods known in the art.

[0435] Other DNA sequence elements that may be included in polynucleotides for use in the compositions and methods described herein affect the stability and/or splicing of the transcribed mRNA and/or stability of the translated protein product. Examples include sequences derived from FKBP12 which destabilize proteins in the absence of exogenous ligands (Banaszynski et al. Cell 126:995 (2006)).

[0436] An example of a cell therapy is modifying hematopoietic stem cells to express the beta-globin protein, which is defective in sickle cell anemia patients, and transplanting the modified cells into patients as a treatment for sickle cell anemia (Clinical trial NCT02140554). Another example is modifying T cells to express a chimeric antigen receptor that enables them to respond to tumor cells, and administering these modified cells to cancer patients, as described in Newick et al., Annual Review of Medicine 68:139 (2017).

### Examples

[0437] The invention is now described with reference to the following Examples. These Examples are provided for the purpose of illustration only, and the invention is not limited to these Examples, but rather encompasses all variations which are evident as a result of the teachings provided herein.

### Methods

[0438] For the Examples described below the following classes were studied:
[0439] Resistant species: mice, rats, rhesus monkeys (rhesus macaque), baboons; and
[0440] Sensitive species: rabbits, pigs, cow, sheep, chimpanzees, and humans.

[0441] In every case, genes or proteins with significant differences in expression or regulation between resistant species and sensitive species were identified.

[0442] We now described Experimental Designs for (1) whole blood transcriptome and plasma proteome and (2) endothelial studies.

### Whole Blood Transcriptome and Plasma Proteome Studies

[0443] Blood was drawn from each of the above species (mice, rats, rhesus monkeys (rhesus macaque), baboons, rabbits, pigs, cow, sheep, chimpanzees, and humans) into prepared “TruCulture” tubes containing heparin and one of three pre-adjusted concentrations of ligands to make final concentrations of the national reference endotoxin E. coli 0113 LPS (10, 100, and 1000 ng/ml) and Poly I:C (10,000 ng/ml) according to standard procedures. The blood was incubated for different times (2 h, 6 h, 24 h), after which the cells were separated, the plasma removed and saved, the red cells lysed, and the remaining cells washed, frozen and sent to Expression Analysis, Inc (Durham, N.C.) for mRNA sequencing. Plasma proteins were processed and analyzed using a liquid chromatography mass spectrometry (LC-MS) platform, in which peptide level analysis was used to identify and quantify specific proteins within each sample and species. Sample processing involves isolation of the protein component of the plasma followed by reduction and digestion to the peptide form which was analyzed within the LC-MS platform. The following analyses were performed:

### Whole Blood Transcriptome Analysis

[0444] Sequence reads were aligned to the appropriate ENSEMBL genome assembly v90 and expressed as transcripts per million. Genes from each species were then assigned to their human orthologs, as defined by ENSEMBL. Genes without human orthologs were eliminated. Where gene loss or duplication resulted in multiple paralogs, the read counts were applied to all members of the family; the evolutionary mismatches were noted and taken into consideration during interpretation. Two sets of analysis were performed, always comparing expression in resistant species with expression in sensitive species.

[0445] A. Baseline Differences

[0446] In this approach, we identified intrinsic differences between gene expression in sensitive vs. resistant species that did not necessarily depend on stimulation. Only samples incubated for 2 hours without LPS stimulation were considered. This condition most closely reflects conditions in the healthy animal, so is referred to as “baseline”. We identified genes that showed clear differences in expression between all sensitive and all resistant species. This is usually defined as FDR <0.05 between mean expression in the two classes, a 1.5-fold difference in expression between all species in each class, and the gene being present in all but one members of the higher expressing class. However, some flexibility in analysis criteria was employed according to genomic context, evolutionary conservation, understanding of bioinformatic methods, and existing knowledge about specific genes.

[0447] B. Fold Change Differences

[0448] This approach identified differences in the responses to stimulation, as opposed to intrinsic differences at baseline. Fold change on LPS stimulation was calculated by dividing a gene's expression after stimulation with LPS by the expression after incubation for the same length of time without LPS. Targets are selected from either or both of two different analyses.

[0449] In the first analysis, significant (FDR<0.05, fold difference >2) difference was required between the mean fold change across sensitive species and the mean fold change across resistant species at 10 pg/ml LPS at any of the three times. These genes were then manually reviewed prior to inclusion. In the second analysis, pigs were counted as resistant for phylogenetic reasons. In this, approach statistical significance was required in all pairwise comparisons of resistant and sensitive species at any time and any dose of LPS.

### Proteomic Analysis

[0450] LC-MS data provided a quantitative peak value for each specific peptide sequence which was linked to the relevant protein, and from which quantitative protein data was generated. Proteins were identified as prospective mediators of resistance or sensitivity if they either 1) achieved a p value <0.05 by ANOVA testing, 2) were detected in at least 3 species of one class but were not detected in any species of the other class, or 3) were not detected in enough species of each class to allow statistical treatment, but nonetheless achieved a >2-fold difference in abundance between classes.

### Validation Assays

### Whole Blood Cytokine Release

[0451] Fresh, anonymized, heparinized, human blood from male donors was diluted 1:3 with RPMI containing penicillin and streptomycin. 150 μl diluted blood was added to each well of a 96 well plate then acclimatized to 37° C. and 5% CO₂ for 1 hour. Inhibitors were prepared as described below then added to the diluted blood in 25 μl volume. After a further hour at 37° C. with 5% CO₂, diluted blood was stimulated with LPS diluted in 25 μl RPMI containing penicillin and streptomycin to a final concentration of 1.5 ng/ml. After 18 h at 37° C. and 5% CO₂, diluted blood was centrifuged at 500×g for 5 min and supernatant collected and stored at −20° C. until ELISAs were performed. Data are presented as mean inhibition relative to vehicle control ±95% confidence intervals, n=3-4 independent experiments.

[0452] Inhibitors and vehicles used for resuspension were: Compound 26, EMD Millipore, Cat #5.31237.0001, resuspended in DMSO; PF 06650833, R & D Systems, Cat #6373, resuspended in DMSO; OEPC (oleyloxyethyl phosphorylcholine), Santa Cruz Biotechnology, item # sc-200711, resuspended in DMSO; YM26734, Santa Cruz Biotechnology, item # sc-204410, resuspended in DMSO; Isoquercetin, Cayman Chemical, item #24926, resuspended in DMSO; ISA-2011B, Medchem Express, cat # HY-16937, resuspended in DMSO; Benzamil, TOCRIS, Cat #3380/10, resuspended in water; Cell permeable NFAT inhibitor (11R-VIVIT), Tocris, Cat #5710, resuspended in PBS. ELISAs were performed using Duoset reagents from R&D systems, catalogue # DY210 (human TNF), # DY206 (human IL6), and #DY201 (human IL-1β).

### RNAi

[0453] PBMCs were isolated from fresh, heparinized, anonymized, human blood by centrifugation on Ficoll 1077 (Sigma) then washed twice with RPMI without antibiotic. PBMCs were resuspended to 1.75×106 per ml in OPTI-MEM I (Gibco), and plated at 175,000 cells per well of a 96 well plate. Cells were transfected by adding 1 μl×100 μM Accell self-delivering siRNA (Horizon Discovery) and maintained at 37° C. with 5% CO2. Catalog numbers for Accell siRNAs were as follows: 23098 (SARM1), 51135 (IRAK4), 7099 (TLR4), D-001910-10-20 (non-targeting pool). After approx. 48 hours, 150 μl RPMI containing 10% FCS was added ±E. coli LPS to a final concentration of 2.5 ng/ml. After a further 4 hours, plates were centrifuged at 500×g for 5 min. 200 μl supernatant was removed and stored at −20° C. until ELISA as described above.

### Endothelial Studies

[0454] Exposure of the endothelium to bacterial cells or to LPS results in leakage of plasma into tissues. This finding can be mimicked in vitro using systems that measure the passage of macromolecules or electrical conductance (transepithelial electrical resistance, TER) across a monolayer of endothelial cells.

[0455] First, using electric cell-substrate impedance sensing (ECIS), we found that the TER across a monolayer of lung microvascular endothelial cells (LMVECs) from sensitive species drops markedly following stimulation with LPS or heat-killed E. coli 018 K+(HKEC), but LMVECs from resistant species show a much more modest change in TER. This finding is consistent with sensitive species suffering greater plasma leakage.

[0456] Second, we also found that human LMVECs grown in serum from resistant species experience a smaller drop in TER than human LMVECs grown in serum from sensitive species. This is consistent with our observation that endotoxin sensitivity of PBMCs depends in part on the serum in which they are grown, with serum from resistant species conferring resistance on cells PBMCs from sensitive animals.

[0457] Third, we found that human LMVECs pretreated with HKEC show much reduced sensitivity to subsequent stimulation with HKEC or LPS—this is an example of tolerance.

### Transcriptomic Profiling

[0458] To identify candidate mediators of resistance, we performed transcriptomic profiling on these three parings of sensitive and resistant phenotypes, and then identified genes that were either (i) expressed differently at baseline (in the absence of stimulation) or (ii) responded differently to stimulation with LPS or HKEC.

[0459] As a form of internal validation, and so as to identify central mediators of endotoxin resistance rather than specific regulators of just one process, we required a significant difference in at least two of the three comparisons for inclusion. Furthermore, the difference had to be in the same direction between different comparisons, viz. expressed more highly in resistant than sensitive in both cases, or vice versa.

[0460] 1. Comparison of Response of Endothelial Cells from Sensitive and Resistant Species

[0461] For this analysis, the following species were used:
[0462] Resistant species cells: rat, mouse; and
[0463] Sensitive species cells: human, cow.

[0464] LMVECs were purchased from PromoCell (human), Alphabioregen (cow), and iXCells (rat). Mouse LMVECs were purchased from Cell Biologics or prepared according to standard methods.

[0465] Cells were cultured in EGM-2 MV (Lonza) supplemented with 5% fetal calf serum (FCS) until confluent, then seeded into 12-well plates at 10⁵ cells per well. After a further 3-4 days, when cells were near confluence as assessed by microscopy, LPS and HKEC were added to wells to final concentrations of 0.1 pg/ml and 10⁶ CFU/ml respectively. After 1 or 3 hours, wells were washed once with PBS, lysed using 1 ml Qiazol (Qiagen) and stored at −80° C. Transcriptomic analyses were performed by Expression Analysis. Each condition was performed in triplicate.

[0466] RNAseq reads were aligned, quantified, and matched to human genes as for whole blood RNAseq (above). Genes with significantly (FDR <0.05, 2-fold tpm difference) different expression between both sensitive and both resistant species with or without HKEC stimulation at either timepoint, and genes with significantly different responses to stimulation at either timepoint were identified.

[0467] 2. Study of Human Endothelial Cells Cultured in Serum from Sensitive and Resistant Species

[0468] For this analysis, the following sera was used:

[0469] Resistant species serum: rat, mouse; and Sensitive species serum: human, cow (fetal calf), rabbit.

[0470] We also used sera from the following species: human (prepared in lab), Sprague Dawley rats (prepared in lab), mouse (Equiptech-Bio), New Zealand White Rabbits (prepared in lab), fetal calf serum (Lonza). Human LMVEC were pre-incubated for 1-3 days in EGM-2 supplemented with the specific serum (human, fetal calf, rabbit, mouse, rat) at a concentration of 5% serum. Cells were then harvested, washed, resuspended in EGM-2 with the same species' serum and utilized for plated in 12 well dishes. After 2-3 days, when cells were near confluence as assessed by microscopy, cells were stimulated, harvested, and sequenced as above. The experiment was repeated 3-4 times to control for batch and donor effects. Sequencing reads were aligned and quantified, and statistical analysis was performed in 1 (Comparison of response of endothelial cells from sensitive and resistant species) as above.

[0471] 3. Comparison of Normal and Tolerant Human Endothelial Cells

[0472] For this analysis, the following phenotypes were used:

[0473] Resistant phenotype: human LMVECS pretreated with HKEC; and

[0474] Sensitive phenotype: human LMVECs without pretreatment.

[0475] Human LMVEC were grown in EGM-2 with 5% FCS until confluent, then stimulated with or without 10⁸ HKEC per T75 flask for 6 hours. LMVECs were then washed, detached, and seeded in 12 well plates at 10⁵ cells per well. After 2-3 days, when the monolayer was approaching confluence, wells were stimulated with or without LPS or HKEC for 1 or 3 hours then harvested and sequenced, as above. Each condition was performed in triplicate.

[0476] Sequencing reads were aligned and quantified, and statistical analysis was performed as in 1(Comparison of response of endothelial cells from sensitive and resistant species) above. In addition, to remove a potential confounding effect of pretreatment, HKEC response genes where pre-treatment with HKEC appeared to enhance the response to second stimulation were excluded.

### Validation Assays

[0477] Where direct chemical modulators of the proposed inflammatory modulators were available, we tested their effect on endothelial permeability using ECIS and/or on the leukocyte inflammatory response using the whole blood assay described above.

[0478] Electric cell substrate impedance sensing (ECIS; Applied Biophysics) measures transendothelial resistance (TER) to the flow of electrical current as a surrogate for permeability. Human LMVECs were seeded into wells of 96-well electrodes (50,000 cells/well). When cells reached confluence, they were pre-treated with the indicated inhibitor or vehicle for 1 hour then stimulated with LPS (0.01-1 pg/ml) or HKEC (10⁵-10⁸ CFU/ml). TER was measured repeatedly over a 24 hours period.

[0479] Agents used were SJ000291942 (Sigma #SML2087-5MG) and saxagliptin (Santa Cruz Biotechnology #sc-473161), both resuspended in DMSO.

### Results

[0480] Results are presented below according to the experiment and analysis approach. Some of the targets identified by each approach have existing links to inflammatory disease while others are previously unidentified. The identification of known mediators not only validates our platform but also validates our identification of the previously unknown targets described herein. Where reagents are available, we have performed proof-of-principle experiments.

A. Whole Blood Transcriptome Analysis—Results from BASELINE Analysis

[0481] Forty-three (43) genes are expressed at different levels in whole blood (leukocytes) from sensitive and resistant species without respect to LPS stimulation, indicating intrinsic differences between the species. These intrinsic differences in gene expression may contribute to the intrinsic differences in LPS between species, and that compounds or methods that alter the expression of these genes or the activities of their products constitute novel therapies. This approach is strongly supported by our identification of known mediators of LPS signaling and/or inflammation, including at least one established anti-inflammatory drug target, which increases our confidence in the significance of the other targets identified by our method.

[0482] For each target, the gene expression profile (in FIG. 1 through FIG. 43) is given for all species for all time and stimulation conditions used. However, the analysis focused on the condition at the far left: 2 hour incubation without stimulant. We call this the baseline condition, which most closely reflects the basal expression within the living animal. In each graph, resistant species are noted throughout. Mean mRNA expression across 3-5 animals is plotted. The FDR corrected p-value for separation between sensitive and resistant, minimum fold difference (fold difference between expression in sensitive species that expresses most strongly and resistant species that expressed most weakly, or vice versa, as appropriate), and average fold difference (fold difference between the average expression in sensitive species and average expression in resistant species) at baseline (2 hour, no stimulation) is given. Some genes were not annotated in the genome assemblies used or have been duplicated or lost during evolution resulting in mismatches between humans and some species—this is noted using the abbreviations Ch (chimp), Rh (rhesus). B, (baboon), C (cow), Sh (sheep), P (pig), M (mouse), Rt (rat) and Rb (rabbit). The ENSEMBL database accession number (ENSGxxx) for the gene is given.

[0483] Where chemical inhibitors are available, the effect of these on cytokine secretion in whole blood assays is shown as percent inhibition. In some cases, the effect of mRNA knockdown in PBMCs on cytokine secretion is shown.

### IRAK4

[0484] IRAK4 is a known regulator of inflammatory signaling. It links the TLR adaptor protein Myd88 to other members of the myddosome, and is therefore essential for MAP kinase and IκB activation. It is a target for inflammatory disease, with at least two small molecule inhibitors in clinical trials. Its discovery and successful validation in our system provides evidence of the validity and effectiveness of the methods disclosed herein for target identification (FIGS. 1A, 1B, and 1C).

### TREML1

[0485] TREML1 is a target for sepsis. It is believed to be secreted by platelets as a competitive inhibitor that prevents the myeloid receptor TREM1 from binding to an unidentified proinflammatory signaling molecule. A peptide mimetic of the putative ligand binding region, which is shared between TREM1 and TREML1 has shown benefit in animal models of endotoxin toxicity and is in clinical trial. TREML1 expression inversely correlates with risk of developing Alzheimer's disease, which is believed to have an inflammatory component. Its identification in our analysis supports the robustness of the disclosed methods to identify correctly mediators of inflammatory disease in the wider sense, and not just immediate participants in LPS signaling (FIG. 2).

### NFATC2

[0486] Nuclear factor of activated T cells family members are well established immune mediators. The identification of NFATC2 in our platform (FIG. 3) and its confirmation in the results found in Table 1 below using a pan-NFAT competitive inhibitor (11R-VIVIT) supports the validity of the methods disclosed herein.

TABLE 1

| | % Inhibition of cytokine release, relative to vehicle | | |
|---|---|---|---|
| 11R-VIVIT | TNF | IL6 | 1L1β |
| 50 μM | 79% ± 14.3% | 87% ± 17.9% | 51% ± 26.3% |
| 25 μM | 40% ± 7.1% | 2% ± 32.9% | 48% ± 27.4% |
| 12.5 μM | 23% ± 12.2% | −10% ± 16.7% | 32% ± 13.0% |

### PLA2G10

[0487] PLA2G10 encodes sPLA2-X a secreted member of the phospholipase A2 family. As such, it has the potential to influence production and metabolism of the known inflammatory mediators: prostaglandin and platelet activating factor. Unlike most other PLA2 enzymes, sPLA2-X is secreted into the bloodstream, where it can both modify inflammation-modulating lipoproteins and act directly on cell surface receptors. Modulation of PLA2G10 or its gene product provides a useful means of treating disorders of immune dysregulation described herein. (FIG. 4). We show, in Table 2 below, that two sPLA2-X inhibitors, OBAA and YM26734, effect dose-dependent inhibition of proinflammatory cytokine release.

TABLE 2

| | % Inhibition of cytokine release, relative to vehicle | | | | |
|---|---|---|---|---|---|
| Drug | OEPC | | YM26734 | | |
| concentration | TNF | IL6 | TNF | IL6 | IL1β |
| 100 μM | 57% ± 6.5% | 83% ± 6.2% | 52% ± 22.7% | 67% ± 15.1% | 78% ± 8.9% |
| 50 μM | 37% ± 14.7% | 65% ± 11.7% | 64% ± 26.1% | 67% ± 21.7% | 73% ± 11.3% |
| 25 μM | 6% ± 17.4% | 39% ± 14.1% | 55% ± 22.6% | 51% ± 29.5% | 65% ± 3.5% |
| 12.5 μM | −9% ± 17.3% | −3% ± 17.6% | 41% ± 17.6% | 35% ± 18.8% | 51% ± 12.0% |

### SARM1

[0488] SARM1 encodes SARM, the 5th member of the TLR signalling adaptor family that also includes Myd88, TRIF, TRAM, and MAL. It has been shown to interact with Myd88 in vitro. This places it at a key location in the proinflammatory signal transduction pathway from TLR and IL1β receptors. Molecules that affect its activity are accordingly useful regulators of inflammation. The role of SARM in axon degeneration and neuron survival has been documented and is under development but its role in leukocyte inflammatory signaling has been neglected. Early reports showed that overexpression in HEK293 cells inhibited TLR signaling, but this has been contradicted in bone marrow derived macrophages from knockout mice. It is unclear whether the discrepancy reflects context specific roles or overexpression artefacts in the earlier studies. A recent report proposed that SARM mediates inflammatory cell death following inflammasome activation in murine macrophages, and that this cell death mediates the lethality of murine endotoxemia. However, this report showed that TNF secretion in murine Sarm1 knockout macrophages was no different to wild-type. Its identification using the methods disclosed herein and validation by gene knockdown indicates a role for SARM1 in human inflammation, modulation of which by established methods may underpin new immunomodulatory therapies (FIGS. 5A, 5B).

### PIP5K1A

[0489] PIP5K1A encodes phosophinositol phosphate 5-kinase 1α: an enzyme that influences receptor signaling and internalisation, including CD14 and TLR4. Its phosphorylated product, PI(4,5)P2 enables recruitment of TIRAP to the plasma membrane and the initiation of Myd88 dependent signalling. Modulation of its activity is accordingly useful for modulating the immune response.

[0490] Its identification by the methods disclosed herein indicates a role for PIP5K1A in human inflammation (FIG. 6).

[0491] In the table below, we demonstrate that a specific PIP5K1a inhibitor, ISA-2011B (see, e.g., Semenas et al. Proc. Nat'l Acad. Sci. USA 111 (35) E3689-E3698 (2014)), inhibits cytokine release in whole blood assay in response to LPS stimulation in a whole blood assay. ISA-2011B was designed as an anti-cancer agent rather than an anti-inflammatory agent, by inhibiting PIP5K1α-dependent growth factor signaling. The findings below (Table 3) provide indicate that inhibitors of PIP5K1a are also useful as anti-inflammatory agents.

TABLE 3

| | % Inhibition of cytokine release, relative to vehicle | | |
|---|---|---|---|
| ISA-2011B | TNF | IL6 | 1L1β |
| 100 μM | 55% ± 8.8% | 24% ± 19.5% | 86% ± 2.9% |
| 10 μM | 17% ± 7.6% | 6% ± 19.7% | 23% ± 6% |
| 1 μM | 1% ± 11.2% | −7% ± 7.7% | 17% ± 9% |

### PDIA4

[0492] PDIA4 encodes a protein disulfide isomerase, Erp72. It is released by activated platelets and contributes to thrombus formation. It is further useful as a gene target for inflammatory disease. A chemical inhibitor, isoquertecin, showed marginal effect in our in vitro whole blood cytokine release assay (Table 4). This is the only target for which we were able to obtain inhibitors which did not validate persuasively (FIG. 7). It is unclear at this stage whether this indicates a genuine false positive from our platform, poor specificity or other failing in the inhibitor, or a role in inflammation that is not well captured by our whole blood assay. The reported and projected roles of Erp72 in clotting and cell adhesion supports this latter option.

TABLE 4

| | % Inhibition of cytokine release, relative to vehicle | | |
|---|---|---|---|
| Isoquertecin | TNF | IL6 | IL1β |
| 100 μM | 29% ± 10.7% | 26% ± 19.2% | 19% ± 35.6% |
| 50 μM | 23% ± 4.6% | 31% ± 8.6% | 25% ± 17.5% |
| 25 μM | 9% ± 1.1% | 26% ± 6.2% | 15% ± 15.6% |

[0493] Additional targets which were identified are ARPC4 (FIG. 8), BNIP3 (FIG. 9), CCDC65 (FIG. 10), CENPH (FIG. 11), CHPT1 (FIG. 12), COMMD3 (FIG. 13), DR1 (FIG. 14), EMC9 (FIG. 15), FGD1 (FIG. 16), FIGNL1 (FIG. 17), GGNBP2 (FIG. 18), GNAO1 (FIG. 19), H2AFZ (FIG. 20), HSPB1 (FIG. 21), IL17RB (FIG. 22), IL17RC (FIG. 23), ILF2 (FIG. 24), PDCD6 (FIG. 25), PEAR1 (FIG. 26), PI3 (FIG. 27), POFUT2 (FIG. 28), RABGEF1 (FIG. 29), RBM4 (FIG. 30), SFN (FIG. 31), SKA2 (FIG. 32), SLC38A2 (FIG. 33), SNRPA1 (FIG. 34), SPCS2 (FIG. 35), TAF1D (FIG. 36), TNFSF10 (FIG. 37), ZNF302 (FIG. 38), ZNF333 (FIG. 39), ZNF419 (FIG. 40), ZNF624 (FIG. 41), ZNF677 (FIG. 42), and ZNF720 (FIG. 43).

B. Results from Whole Blood Transcriptome Analysis—Results from FOLD CHANGE Analysis

[0494] With this analysis, 9 genes responded differently to LPS in sensitive (human, chimp, rabbit, sheep, cow, and pig) vs. resistant species (baboon, rhesus monkey (rhesus macaque), rat, and mouse). The effect of 10 ng/ml LPS on each gene is shown in FIGS. 44-53 for the times when there is significant difference between sensitive and resistant animals. In each case, black bars indicate the mean fold change for each species relative to samples incubated for the same time without LPS. Each data point corresponds to blood from a different animal (or pool of animals, in the case of mice and rats). As previously, sensitive species are noted.

### CD14 and AOAH

[0495] CD14 is known to encode a co-receptor for LPS, and AOAH encodes the principal LPS detoxifying enzyme, acyloxyacyl hydrolase. Referring to FIGS. 44 and 45, the identification of these key proteins involved in LPS metabolism supports our claim for the following 7 gene products.

### SLC8A1

[0496] SLC8A1 was identified in our whole blood analysis (FIG. 46). Our methodology is further supported by our finding that benzamil, an inhibitor of Na+/Ca2+ exchangers expected to inhibit the product of SLC8A1, substantially inhibits LPS stimulated TNF secretion in our whole blood assay. These results are presented in Table 5 below. SLC8A1 accordingly was identified in our platform.

TABLE 5

| | % Inhibition of cytokine release, relative to vehicle | | |
|---|---|---|---|
| Benzamil | TNF | IL6 | IL1β |
| 100 μM | 69% ± 6.6% | 65% ± 12.5% | 60% ± 32.8% |
| 50 μM | 23% ± 6.2% | 22% ± 13.2% | 48% ± 33.3% |
| 25 μM | 4% ± 7.9% | 11% ± 9.3% | 32% ± 29.6% |

[0497] Additional gene targets identified using the FOLD CHANGE analysis are ASPRV1 (FIG. 47), ARHGEF10L (FIG. 48), EHD1 (FIG. 49), LCN2 (FIGS. 50, 51), ST3GAL6 (FIG. 52), and MFSD1 (FIG. 53).

C. Results from Proteomic Analysis

[0498] Using this analysis, there were 26 protein targets identified (FIGS. 54 through 79).

[0499] The following proteins were part of this group and are provided as examples. In each case, the protein abundance in each species where a given protein was detected is presented as label-free quantitation (LFQ) intensity. As before, resistant species are noted. The corresponding gene name and Ensembl ID is provided, as is the number of species in which the protein was detected.

Lipoprotein (a) (apo(a))

[0500] This protein, together with apolipoprotein B, cholesterol, and other lipids, comprises Lp(a)—a low-density lipoprotein particle. Elevated serum Lp(a) is recognized as a risk factor for cardiovascular disease. Both Lp(a) and apo(a) itself are established therapeutic targets for cardiovascular disease. In this context, Lp(a) is believed to promote inflammation by mediating deposition of cholesterol on the arterial endothelium. However, in addition to well-established roles promoting inflammation, Lp(a) may exert anti-inflammatory effects by mediating clearance of both oxidized phospholipids and LPS, and reduced Lp(a) has been reported during late onset neonatal sepsis, indicating a more complicated role in different inflammatory diseases. Our identification of a difference in apo(a) protein abundance expression between plasma from sensitive and resistant species serves as a validation of the disclosed methodology (FIG. 54).

### Adhesion Molecules

[0501] Both endothelial cell selective adhesion molecule (ESAM) and platelet and endothelial cell adhesion molecule (PECAM1) are immunoglobulin-type proteins involved in regulating barrier endothelial integrity and leukocyte transmigration. Interpretation of molecular and knockout studies is often confounded by the existence of both transmembrane, signal transducing forms and secreted, serum forms that have the potential to act as decoy inhibitors. However, both are known to act in not only chronic but also acute inflammatory disorders, including by regulation migration of pro-inflammatory leukocytes into the tissues. Consistent with the reduced expression we detect in serum of resistant species, Pecam1 knockout mice show enhanced mortality in the LPS challenge model of sepsis.

[0502] In humans, both sPECAM1 and sESAM have been investigated as biomarkers for sepsis, cardiovascular disease, and other inflammatory diseases. The identification of these known modulators of inflammation in our differential plasma proteomics study validates the disclosed method (FIGS. 55 and 56). Their importance in regulating endothelial permeability reinforces the link between endothelial permeability, inflammation, and serum composition.

[0503] Additional identified targets using this methodology include Afamin (AFM) (FIG. 57), Amyloid P component, serum (APCS) (FIG. 58), Beta-1,4-glucuronyltransferase 1 (B4GAT1) (FIG. 59), Cadherin 6, type 2, K-cadherin (CDH6) (FIG. 60), CutA divalent cation tolerance homolog (E. coli) (CUTA) (FIG. 61), Deleted in malignant brain tumors 1 (DMBT1)(FIG. 62), Coagulation factor XII (Hageman factor) (F12) (FIG. 63), Fc fragment of IgG binding protein (FCGBP) (FIG. 64), Grancalcin (GCA) (FIG. 65), Glyoxalase domain containing 4 (GLOD4)(FIG. 66), Glycoprotein V (platelet) (GP5) (FIG. 67), HGF activator (HGFAC) (FIG. 68), Insulin like growth factor 1 (IGF1) (FIG. 69), Multimerin 2 (MMRN2) (FIG. 70), Oncostatin M receptor (OSMR) (FIG. 71), Platelet factor 4 variant 1 (PF4V1) (FIG. 72), Phosphofructokinase, liver (PFKL) (FIG. 73), Periostin, osteoblast specific factor (POSTN) (FIG. 74), Serum amyloid A4 (SAA4)(FIG. 75), Scavenger receptor cysteine rich family, 5 domains (SSC5D) (FIG. 76), TIMP metallopeptidase inhibitor 3 (TIMP3) (FIG. 77), Tenascin XB (TNXB) (FIG. 78), and Tyrosine 3-monooxygenase/tryptophan 5-monooxygenase activation protein, gamma (YWHAG) (FIG. 79).

### C. Results for Endothelial Analysis

[0504] Using this analysis, 38 endothelial genes were identified as targets. These include known mediators of inflammation and endothelial barrier integrity. This evidence provides further validation for our model.

[0505] Given the involvement of both endothelial barrier permeability and leukocyte cytokine secretion in the inflammatory process, we tested chemical modulators of some of the identified targets in both the ECIS permeability assay and the whole blood cytokine release assay. Gene expression plots are shown for the two or three RNAseq experiments that showed a difference between sensitive and resistant species. As before, the sensitive condition (species of cell, species of serum, or human cells without HKEC pretreatment) is shown and the resistant condition are noted. Also provided, where appropriate, are the ECIS electrical conductance plots of human lung microvascular endothelial cells (LMVECs) following treatment with specific small molecules and heat killed E. coli (HKEC), and plots of cytokine release from human whole blood following LPS stimulation in the presence of specific drugs.

[0506] Examples that provide validation of the method and/or the specific target are shown first.

### DPP4

[0507] DPP4 encodes dipeptidyl peptidase 4, an established target in type 2 diabetes mellitus that may also be involved in other metabolic diseases. DPP4 inhibitors have been proposed to ameliorate inflammation by mechanisms including inflammasome and TLR4/p38 inhibition. This is consistent with the greater expression we observed in sensitive endothelial cells, especially those from humans relative to rat and mouse. While linked to vascular endothelial function, especially in the context of cardiovascular disease, DPP4 has not been convincingly linked to endothelial permeability during inflammation or other stresses. FIGS. 80A and 80B show DPP4 expression in endothelial cells and in endothelial cells cultured in serum, respectively.

[0508] Further, our results in FIG. 80C show that the DPP4 inhibitor, saxagliptin, causes a dose dependent reduction in human LMVEC barrier permeability following HKEC stimulation. These data validate our method for target discovery.

### BMP4

[0509] BMP4 is expressed more highly in human endothelial cells grown in serum from sensitive animals and in endothelial cells from sensitive animals (FIGS. 81A and 81B). The gene product, bone morphogenic family 4, is a TGFβ family member with pleiotropic roles in development. This includes endothelial development, where there is good evidence that it promotes barrier permeability. Endothelial-specific gene knockout reduces leukocyte infiltration in thioglycolate elicited peritoneal inflammation model. Furthermore, BMP4 exacerbates cardiovascular disease in the ApoE4 mouse model by mediating inflammation and vascular permeability. Repression of BMP4 expression may contribute to the protective effect of mevastatin in cardiovascular disease.

[0510] We have found that an agonist of BMP receptor signaling, SJ000291942, enhances proinflammatory cytokine secretion in our whole blood model (FIG. 81C). Thus, our transcriptomic analysis shows higher expression of BMP4 in sensitive cells, correctly identifying a factor that connects inflammation and endothelial permeability.

### MYLK2 and MYLK4

[0511] MYLK2 and MYLK4 encode myosin light chain kinases (MLCKs). Phosphorylation of myosin by MLCKs causes contraction in a range of contractile cells, including endothelial cells, where contraction leads to barrier hyperpermeability. Transient transfection of activated MLCK protein has been shown to increase albumin permeability of a bovine coronary vein endothelial cell monolayer in vitro.

[0512] Moreover, chemical MLCK inhibition reduces barrier hyperpermeability in response to treatment of renal endothelial cells with TNF. Thus, the greater expression of two MLCK genes in human LMVECs relative to tolerant or rodent cells is consistent with their greater propensity for hyperpermeability and supports the validity of our approach to identify novel targets for intervention (FIGS. 82A-82D).

[0513] Additional identified targets found using this method include ADAM12 (FIG. 83A-83B), ADAM19 (FIG. 83C-83D), ADRB1(FIG. 84A-84B), ALDH1A2 (FIG. 85A-85C), ANKRD55 (FIG. 86A-86B), CLU (FIG. 87A-87B), CTDSPL (FIG. 88A-88B), CTNNAL1 (FIG. 89A-89B), DHFR (FIG. 90A-90B), DNAJB4 (FIG. 91A-91B), DPYD (FIG. 92A-92B), FZD10 (FIG. 93A-93B), GAB1 (FIG. 94A-94B), GADD45G (FIG. 95A-95B), HCRTR1 (FIG. 96A-96B), IL7 (FIG. 97A-97B), LRRC1 (FIG. 98A-98B), MYLIP (FIG. 99A-99B), NR1H3 (FIG. 100A-100B), PCGF5 (FIG. 101A-101B), PLSCR4 (FIG. 102A-102B), RAB11FIP1 (FIG. 103A-103B), RASD1 (FIG. 104A-104B), RGS16 (FIG. 105A-105B), RPGR (FIG. 106A-106B), RUNX1T1 (FIG. 107A-107B), SLC40A1 (FIG. 108A-108B), SLCO2A1 (FIG. 109A-109B), STAT1 (FIG. 110A-110B), SULT1B1 (FIG. 111A-111B), TBC1D8 (FIG. 112A-112B), TGM2 (FIGS. 113A-113B), and WNT4 (FIGS. 114A-114B), and FGF1 (FIG. 115A-115B).

[0514] Genes or gene products associated with a sensitive response are provided in the table below.

TABLE 6

| | | | SEQ |
|---|---|---|---|
| | | | ID |
| | NCBI Name | | NO: |
| 1. | EMC9 | ER Membrane Protein | 1 |
| | [ENSG00000100908] | Complex Subunit 9; Fam158a | |
| 2. | IRAK4 | Interleukin 1 Receptor | 2-3 |
| | [ENSG00000198001] | Associated Kinase 4 | |
| 3. | NFATC2 | Nuclear Factor Of Activated | 4-8 |
| | [ENSG00000101096] | T Cells 2 | |
| 4. | PLA2G10 | Phospholipase A2 Group | 9 |
| | [ENSG00000069764] | X, sPLA₂-X | |
| 5. | SARM1 | Sterile Alpha And TIR Motif | 10-11 |
| | [ENSG00000004139] | Containing 1 | |
| 6. | PIP5K1A | Phosphatidylinositol-4-Phosphate | 12-15 |
| | [ENSG00000143398] | 5-Kinase Type 1 Alpha | |
| 7. | PDIA4 | Protein Disulfide Isomerase | 16 |
| | [ENSG00000155660] | Family A Member 4, Erp72 | |
| 8. | ARPC4 | Actin Related Protein 2/3 | 17-20 |
| | [ENSG00000241553] | Complex Subunit 4 | |
| 9. | BNIP3 | BCL2 Interacting Protein 3 | 21 |
| | [ENSG00000176171] | | |
| 10. | CCDC65 | Coiled-Coil Domain | 22-23 |
| | [ENSG00000139537] | Containing 65 | |
| 11. | CENPH | Centromere Protein H | 24 |
| | [ENSG00000153044] | | |
| 12. | CHPT1 | Choline Phosphotransferase 1 | 25-26 |
| | [ENSG00000111666] | | |
| 13. | COMMD3 | COMM Domain Containing 3 | 27 |
| | [ENSG00000148444] | | |
| 14. | DR1 | Down-Regulator Of | 28 |
| | [ENSG00000117505] | Transcription 1 | |
| 15. | FGD1 | FYVE, RhoGEF And PH | 29 |
| | [ENSG00000102302] | Domain Containing 1 | |
| 16. | FIGNL1 | Fidgetin Like 1 | 30-31 |
| | [ENSG00000132436] | | |
| 17. | GGNBP2 | Gametogenetin Binding | 32-34 |
| | [ENSG00000278311] | Protein 2 | |
| 18. | GNAO1 | G Protein Subunit Alpha O1 | 35-36 |
| | [ENSG00000087258] | | |
| 19. | H2AFZ | H2A Histone Family Member Z | 37 |
| | [ENSG00000164032] | | |
| 20. | HSPB1 | Heat Shock Protein Family B | 38 |
| | [ENSG00000106211] | (Small) Member 1 | |
| 21. | IL17RB | Interleukin 17 Receptor B | 39-40 |
| | [ENSG00000056736] | | |
| 22. | IL17RC | Interleukin 17 Receptor C | 41-48 |
| | [ENSG00000163702] | | |
| 23. | ILF2 | Interleukin Enhancer | 49 |
| | [ENSG00000143621] | Binding Factor 2 | |
| 24. | PDCD6 | Programmed Cell Death 6 | 50-52 |
| | [ENSG00000249915] | | |
| 25. | PI3 | Peptidase Inhibitor 3 | 53 |
| | [ENSG00000124102] | | |
| 26. | POFUT2 | Protein O-Fucosyltransferase 2 | 54-56 |
| | [ENSG00000186866] | | |
| 27. | RABGEF1 | RAB Guanine Nucleotide | |
| | [ENSG00000154710] | Exchange Factor 1 | |
| 28. | RBM4 | RNA Binding Motif Protein 4 | 60-63 |
| | [ENSG00000173933] | | |
| 29. | SKA2 | Spindle And Kinetochore | 64-65 |
| | [ENSG00000182628] | Associated Complex Subunit 2 | |
| 30. | SLC38A2 | Solute Carrier Family 38 | 66-67 |
| | [ENSG00000134294] | Member 2 | |
| 31. | SNRPA1 | Small Nuclear Ribonucleoprotein | 68 |
| | [ENSG00000131876] | Polypeptide A′ | |
| 32. | SPCS2 | Signal Peptidase Complex | 69 |
| | [ENSG00000118363] | Subunit 2 | |
| 33. | TAF1D | TATA-Box Binding Protein | 70 |
| | [ENSG00000166012] | Associated Factor, RNA | |
| | | Polymerase I Subunit D | |
| 34. | TNFSF10 | TNF Superfamily Member | 71-72 |
| | [ENSG00000121858] | 10, TRAIL | |
| 35. | ZNF302 | Zinc Finger Protein 302 | 73-74 |
| | [ENSG00000089335] | | |
| 36. | ZNF333 | Zinc Finger Protein 333 | 75-77 |
| | [ENSG00000160961] | | |
| 37. | ZNF419 | Zinc Finger Protein 419 | 78-83 |
| | [ENSG00000105136] | | |
| 38. | ZNF624 | Zinc Finger Protein 624 | 84-85 |
| | [ENSG00000197566] | | |
| 39. | ZNF677 | Zinc Finger Protein 677 | 86 |
| | [ENSG00000197928] | | |
| 40. | ZNF720 | Zinc Finger Protein 720 | 87-88 |
| | [ENSG00000197302] | | |
| 41. | LPA | Lipoprotein(A), apo(a) | 89 |
| | [ENSG00000198670] | | |
| 42. | B4GAT1 | Beta-1,4-glucuronyltransferase 1 | 90 |
| | [ENSG00000174684] | | |
| 43. | CDH6 | Cadherin 6, type 2, K-cadherin | 91-92 |
| | [ENSG00000113361] | | |
| 44. | CUTA | CutA divalent cation tolerance | 93-95 |
| | [ENSG00000112514] | homolog (E. coli) | |
| 45. | DMBT1 | Deleted in malignant brain | 96-104 |
| | [ENSG00000187908] | tumors 1 | |
| 46. | FCGBP | Fc fragment of IgG binding | 105 |
| | [ENSG00000281123] | protein | |
| 47. | OSMR | Oncostatin M receptor | 106-107 |
| | [ENSG00000145623] | | |
| 48. | SSC5D | Scavenger receptor cysteine rich | 108-109 |
| | [ENSG00000179954] | family, 5 domains | |
| 49. | TNXB | Tenascin XB | 110-113 |
| | [ENSG00000168477] | | |
| 50. | BMP4 | Bone Morphogenetic Protein 4 | 114 |
| | [ENSG00000125378] | | |
| 51. | DPP4 | Dipeptidyl Peptidase 4 | 115 |
| | [ENSG00000197635] | | |
| 52. | MYLK2 | Myosin Light Chain Kinase 2 | 116 |
| | [ENSG00000101306] | | |
| 53. | MYLK4 | Myosin Light Chain Kinase | 117-118 |
| | [ENSG00000145949] | Family Member 4 | |
| 54. | ADRB1 | Adrenoceptor Beta 1 | 119 |
| | [ENSG00000043591] | | |
| 55. | ALDH1A2 | Aldehyde Dehydrogenase 1 | 120-123 |
| | [ENSG00000128918] | Family Member A2 | |
| 56. | ANKRD55 | Ankyrin Repeat Domain 55 | 124-126 |
| | [ENSG00000164512] | | |
| 57. | CLU | Clusterin | 127-132 |
| | [ENSG00000120885] | | |
| 58. | CTDSPL | CTD Small Phosphatase Like | 133-134 |
| | [ENSG00000144677] | | |
| 59. | CTNNAL1 | Catenin Alpha Like 1 | 135-137 |
| | [ENSG00000119326] | | |
| 60. | DHFR | Dihydrofolate Reductase | 138-139 |
| | [ENSG00000228716] | | |
| 61. | DNAJB4 | DnaJ Heat Shock Protein Family | 140 |
| | [ENSG00000162616] | (Hsp40) Member B4 | |
| 62. | DPYD | Dihydropyrimidine | 141-142 |
| | [ENSG00000188641] | Dehydrogenase | |
| 63. | FZD10 | Frizzled Class Receptor 10 | 143 |
| | [ENSG00000111432] | | |
| 64. | GAB1 | GRB2 Associated Binding | 144-145 |
| | [ENSG00000109458] | Protein 1 | |
| 65. | HCRTR1 | Hypocretin Receptor 1 | 146 |
| | [ENSG00000121764] | | |
| 66. | IL7 | Interleukin 7 | 147-149 |
| | [ENSG00000104432] | | |
| 67. | LRRC1 | Leucine Rich Repeat | 150-151 |
| | [ENSG00000137269] | Containing 1 | |
| 68. | MYLIP | Myosin Regulatory Light Chain | 152-153 |
| | [ENSG00000007944] | Interacting Protein | |
| 69. | NR1H3 | Nuclear Receptor Subfamily 1 | 154-156 |
| | [ENSG00000025434] | Group H Member 3 | |
| 70. | PCGF5 | Polycomb Group Ring Finger 5 | 157-158 |
| | [ENSG00000180628] | | |
| 71. | PLSCR4 | Phospholipid Scramblase 4 | 159-160 |
| | [ENSG00000114698] | | |
| 72. | RAB11FIP1 | RAB11 Family Interacting | 161-165 |
| | [ENSG00000156675] | Protein 1 | |
| 73. | RPGR | Retinitis Pigmentosa | 166-171 |
| | [ENSG00000156313] | GTPase Regulator | |
| 74. | RUNX1T1 | RUNX1 Partner Transcriptional | 172-177 |
| | [ENSG00000079102] | Co-Repressor 1 | |
| 75. | SLC40A1 | Solute Carrier Family 40 | 178 |
| | [ENSG00000138449] | Member 1 | |
| 76. | SLCO2A1 | Solute Carrier Organic Anion | 179 |
| | [ENSG00000174640] | Transporter Family Member 2A1 | |
| 77. | STAT1 | Signal Transducer And Activator | 180-181 |
| | [ENSG00000115415] | Of Transcription 1 | |
| 78. | SULT1B1 | Sulfotransferase Family 1B | 182 |
| | [ENSG00000173597] | Member 1 | |
| 79. | TBC1D8 | TBC1 Domain Family | 183-184 |
| | [ENSG00000204634] | Member 8 | |
| 80. | TGM2 | Transglutaminase 2 | 185-187 |
| | [ENSG00000198959] | | |
| 81. | WNT4 | Wnt Family Member 4 | 188-189 |
| | [ENSG00000162552] | | |

[0515] Genes or gene products associated with a resistant response are provided in the table below.

TABLE 7

| | | | SEQ |
|---|---|---|---|
| | NCBI Name | | ID NO: |
| 1. | ARHGEF10L | Rho Guanine Nucleotide | 190-194 |
| | [ENSG00000074964] | Exchange Factor 10 | |
| | | Like; GrinchGEF | |
| 2. | SLC8A1 | Solute Carrier Family 8 | 195-199 |
| | [ENSG00000183023] | Member A1; NCX1 | |
| 3. | TREML1 | Triggering Receptor | 200-202 |
| | [ENSG00000161911] | Expressed On Myeloid | |
| | | Cells Like 1 | |
| 4. | PEAR1 | Platelet Endothelial | 203 |
| | [ENSG00000187800] | Aggregation Receptor 1 | |
| 5. | SFN | Stratifin | 204-205 |
| | [ENSG00000175793] | | |
| 6. | CD14 | CD14 Molecule | 206 |
| | [ENSG00000170458] | | |
| 7. | AOAH | Acyloxyacyl Hydrolase | 207-208 |
| | [ENSG00000136250] | | |
| 8. | ASPRV1 | Aspartic Peptidase | 209 |
| | [ENSMUSG00000033508] | Retroviral Like 1 | |
| 9. | EHD1 | EH Domain Containing 1 | 210 |
| | [ENSG00000110047] | | |
| 10. | LCN2 | Lipocalin 2 | 211 |
| | [ENSMUSG00000026822] | | |
| 11. | ST3GAL6 | ST3 Beta-Galactoside Alpha- | 212-213 |
| | [ENSG00000064225] | 2,3-Sialyltransferase 6 | |
| 12. | MFSD1 | Major Facilitator Superfamily | 214-219 |
| | [ENSG00000118855] | Domain Containing 1 | |
| 13. | PECAM1 | Platelet and Endothelial Cell | 220-225 |
| | [ENSG00000261371 | Adhesion Molecule 1 | |
| 14. | ESAM | Endothelial Cell | 226-227 |
| | [ENSG00000149564] | Adhesion Molecule | |
| 15. | AFM | Afamin | 228 |
| | [ENSG00000079557] | | |
| 16. | APCS | Amyloid P component, | 229 |
| | [ENSG00000132703] | serum | |
| 17. | F12 | Coagulation factor XII | 230 |
| | [ENSG00000131187] | (Hageman factor) | |
| 18. | GCA | Grancalcin | 231 |
| | [ENSG00000115271] | | |
| 19. | GLOD4 | Glyoxalase domain | 232-234 |
| | [ENSG00000167699] | containing 4 | |
| 20. | GPS | Glycoprotein V (platelet) | 235 |
| | [ENSG00000178732] | | |
| 21. | HGFAC | HGF activator | 236 |
| | [ENSG00000109758] | | |
| 22. | IGF1 | Insulin like growth factor 1 | 237-240 |
| | [ENSG00000017427] | | |
| 23. | MMRN2 | Multimerin 2 | 241 |
| | [ENSG00000173269] | | |
| 24. | PF4V1 | Platelet Factor 4 Variant 1 | 242 |
| | [ENSG00000109272] | | |
| 25. | PFKL | Phosphofructokinase, liver | 243-244 |
| | [ENSG00000141959] | | |
| 26. | POSTN | Periostin, osteoblast | 245-251 |
| | [ENSG00000133110] | specific factor | |
| 27. | SAA4 | Serum amyloid A4 | 252 |
| | [ENSG00000148965] | | |
| 28. | TIMP3 | TIMP metallopeptidase | 253 |
| | [ENSG00000100234] | inhibitor 3 | |
| 29. | YWHAG | Tyrosine 3-monooxygenase/ | 254 |
| | [ENSG00000170027] | tryptophan 5-monooxygenase | |
| | | activation protein, gamma | |
| 30. | ADAM12 | ADAM Metallopeptidase | 255-258 |
| | [ENSG00000148848] | Domain 12 | |
| 31. | ADAM19 | ADAM Metallopeptidase | 259-260 |
| | [ENSG00000135074] | Domain 19 | |
| 32. | FGF1 | Fibroblast growth factor 1 | 261-262 |
| | [ENSG00000113578] | | |
| 33. | GADD45G | Growth Arrest and DNA | 263 |
| | [ENSG00000130222] | Damage Inducible Gamma | |
| 34. | RASD1 | Ras Related Dexamethasone | 264-265 |
| | [ENSG00000108551] | Induced 1 | |
| 35. | RGS16 | Regulator of G Protein | 266 |
| | [ENSG00000143333] | Signaling 16 | |

[0516] All publications (including patents and patent applications including U.S. provisional application Ser. Nos. 62/794,386 and 62/930,813) mentioned in this specification are herein incorporated by reference to the same extent as if each individual publication or patent was specifically and individually indicated to be incorporated by reference.

### Other Embodiments

[0517] From the foregoing description, it will be apparent that variations and modifications may be made to the invention described herein to adopt it to various usages and conditions. Such embodiments are also within the scope of the following claims.

What is claimed is:

1. A method for treating a disease of immune dysregulation in a mammal, the method comprising administering to the mammal a therapeutically effective amount of a modulating agent or subjecting the mammal to a modulating process, wherein the modulating agent or process alters the expression or activity of a gene target associated with a sensitive response or a resistant response to an inflammatory stimulus.

2. A method for altering an immune response in a mammal, the method comprising administering to the mammal a therapeutically effective amount of a modulating agent or subjecting the mammal to a modulating process, wherein the modulating agent or process alters the expression or activity of a gene target associated with a sensitive response or a resistant response to an inflammatory stimulus.

3. The method of claim 1 or 2, wherein the gene target is a gene or gene product associated with a sensitive response.

4. The method of claim 3, wherein the gene is EMC9 or the gene product is an RNA or polypeptide encoded by EMC9.

5. The method of claim 1 or 2, wherein the gene target is a gene or gene product associated with a resistant response.

6. The method of claim 5, wherein the gene is ARHGEF10L or the gene product is an RNA or polypeptide encoded by ARHGEF10L.

7. The method of claim 1, wherein the modulating agent or process increases the expression or activity of the gene target.

8. The method of claim 7, wherein the modulating agent is an activator of the gene target, an agonist antibody of the gene target, a cell expressing the gene target, a mimetic of the gene target, a derivative or recombinant form of the gene target, or a soluble form of the gene target.

9. The method of claim 7, wherein the modulating process is overexpression of the gene target or overexpression or depletion of a signal, signaling regulator, or receptor associated with the gene target.

10. The method of claim 1, wherein the modulating agent or process decreases the expression or activity of the gene target.

11. The method of claim 10, wherein the modulating agent is an inhibitor of the gene target, an inhibiting or neutralizing antibody of the gene target, a moiety blocking a receptor associated with the gene target, or a RNAi molecule targeting the gene target.

12. The method of claim 10, wherein the modulating process is depletion of cells expressing the gene target, overexpression or depletion of a signal, signaling regulator, or receptor associated with the gene target, depletion of a ligand of the gene target, or genetic ablation of the gene target.

13. The method of claim 1, wherein the modulating agent is a protein, a peptide, a polynucleotide, a small molecule, or a chemical.

14. The method of claim 1, wherein the modulating agent is delivered orally, by injection, by a lipid-based carrier, or by a nanoparticle-type carrier.

15. The method of claim 1, wherein the modulating agent is delivered by an expression vector or plasmid containing a gene insert that codes for the immunomodulant agent.

16. The method of claim 1, wherein the modulating agent is associated with a gene editing technology.

17. The method of claim 1, wherein the inflammatory stimulus is a bacterial lipopolysaccharide (LPS).

18. The method of claims 1 and 3, wherein the disease of immune dysregulation is an inflammatory disease.

19. The method of claim 18, wherein the inflammatory disease is a dermatological disorder.

20. The method of claim 19, wherein the dermatological disorder is atopic dermatitis, alopecia areata, bulloid pemphigus, chronic eczema, dermatomyositis, erythema nodosum, epidermolysis bullosa, hydradenitis suppurativa, lichen planus, pemphigus vulgaris, psoriasis, pyoderma gangrenosum, scleroderma, or vitiligo.

21. The method of claim 18, wherein the inflammatory disease is sepsis, achalasia, acute or ischemic colitis, acute respiratory distress syndrome, allergy, allograft rejection, alveolitis, Alzheimer's disease, a neurological disease associated with amyloidosis, amebiasis, anaphylactic shock, angiitis, ankylosing spondylitis, appendicitis, arteritis, arthralgia, arthritides, asthma, atherosclerosis, Behcet's syndrome, Berger's disease, bronchiolitis, bronchitis, burns, cachexia, candidiasis, cerebral embolism, cerebral infarction, cholangitis, cholecystitis, chronic fatigue syndrome, celiac disease, Crohn's disease, congestive heart failure, Crohn's disease, cystic fibrosis, Dengue fever, dermatitis, dermatomyositis, disseminated bacteremia, diverticulitis, duodenal ulcers, emphysema, encephalitis, endocarditis, endotoxic shock, enteritis, eosinophilic granuloma, epididymitis, epiglottitis, fasciitis, filariasis, gastric ulcers, Goodpasture's syndrome, gout, graft-versus-host disease, granulomatosis, Guillan-Barre syndrome, hay fever, hepatitis, hepatitis B virus infection, hepatitis C virus infection, herpes infection, HIV infection, Hodgkin's disease, hydatid cysts, hyperpyrexia, immune complex disease, influenza, juvenile idiopathic arthritis, malaria, meningitis, multiple sclerosis, a multiple sclerosis-associated demyelination disease, myasthenia gravis, myocardial ischemia, myocarditis, neuralgia, neuritis, organ ischemia, organ necrosis, osteomyelitis, Paget's disease, pancreatitis, ulcerative pancreatitis, pseudomembranous colitis, pancreatitis, paralysis, peptic ulcers, periarteritis nodosa, pericarditis, periodontal disease, peritonitis, pharyngitis, pleurisy, pneumonitis, pneumonoultramicroscopicsilicovolcanokoniosis, polymyalgia rheumatica, prostatitis, psoriatic arthritis, pseudomembranous Reiter's syndrome, reperfusion injury, respiratory syncytial virus infection, rheumatic fever, rheumatoid arthritis, rhinitis, sarcoidosis, septic abortion, septicemia, sinusitis, forms of cancer having an inflammatory component, spinal cord injury, sunburn, synovitis, systemic lupus erythematosus, systemic lupus erythrocytosis, thrombophlebitis, thyroiditis, Type I diabetes, ulcerative colitis, urethritis, urticaria, uveitis, vaginitis, vasculitis, warts, wheals, or Whipple's disease.

22. The method of claim 18, wherein the inflammatory disease is sepsis.

23. The method of claims 1 and 3, wherein the disease of immune dysregulation is secondary induced inflammation.

24. The method of claim 23, wherein the secondary induced inflammation is associated with a bacterial infection, a viral infection, a fungal infection, or a parasitic infection.

25. The method of claim 18, wherein the inflammatory disease is allograft rejection and wherein the composition further comprises an immunosuppressant used to inhibit allograft rejection.

26. The method of claim 18, wherein the inflammatory disease is a xenograft rejection and wherein the composition further comprises an immunosuppressant used to treat xenograft rejection.

27. The method of claim 2, where the mammal has a cancer and the alteration of the expression or activity of the gene target increases an innate immune response of the mammal.

28. The method of claim 1, wherein the mammal is a human.

29. A method for identifying one or more effective therapeutic intervention targets for a disease of immune dysregulation, the method comprising:
(iii) measuring a whole transcriptome gene expression profile in leukocytes from a whole blood sample of a mammal, wherein the mammal or the whole blood sample has been treated with a pro-inflammatory stimulus or has not been treated with an inflammatory stimulus and wherein the mammal has an in vivo innate immune response that is resistant or sensitive, and
(iv) identifying the whole-transcriptome gene expression profile as associated with innate immune resistance or sensitivity based on the in vivo innate immune response of the mammal,
wherein the gene expression profiles are associated with innate immune resistance or sensitivity and are potential therapeutic targets for diseases of innate immune dysregulation.

30. A method for identifying a therapeutic intervention target for a disease of immune dysregulation, the method comprising:
(a) determining a gene expression profile in a blood sample of a first mammal, wherein the first mammal has an in vivo innate immune response that is resistant,
(b) determining a gene expression profile in a blood sample of a second mammal, wherein the second mammal has an in vivo innate immune response that is sensitive,
(c) identifying a gene or gene target having differential expression between the first mammal and the second mammal, and
(d) identifying said gene or gene target as associated with a resistant response or a sensitive response based on said differential expression,
wherein a gene or gene target associated with a resistant response or a sensitive response is identified as a therapeutic intervention target for a disease of immune dysregulation.

31. The method of claim 30, wherein the first mammal and the second mammal, or the whole blood samples thereof, have not been treated with an inflammatory stimulus.

32. The method of claim 30, wherein the first mammal and the second mammal, or the whole blood samples thereof, have been treated with an inflammatory stimulus and the differential expression is differential expression following exposure to the inflammatory stimulus.

33. The method of claim 32, wherein the inflammatory stimulus is a toxin such as LPS or a viral mimic.

34. The method of claim 32, wherein the viral mimic is polyinosinic:polycytidylic acid (Poly(I:C)).

35. The method of claim 30, wherein the first mammal is one or more of baboon, rhesus monkey (rhesus macaque), rat, or mouse.

36. The method of claim 30, wherein the second mammal is one or more of human, chimp, rabbit, sheep, cow, or pig.

37. A method for assessing an immune response of a mammal, the method comprising determining the expression of a gene target associated with a sensitive response or a resistant response to an inflammatory stimulus in the mammal, wherein the expression of the gene target identifies the immune response of the mammal as a sensitive response or a resistant response.

38. The method of claim 37, wherein the gene target is a gene or gene product associated with a resistant response.

39. The method of claim 38, wherein the gene is one or more of ARHGEF10L, SLC8A1, TREML1, PEAR1, SFN, CD14, AOAH, ASPRV1, EHD1, LCN2, ST3GAL6, MFSD1, PECAM1, ESAM, AFM, APCS, F12, GCA, GLOD4, GP5, HGFAC, IGF1, MMRN2, PF4V1, PFKL, POSTN, SAA4, TIMP3, YWHAG, ADAM12, ADAM19, GADD45G, FGF1, RASD1 or RGS16, or the gene product is an RNA or polypeptide encoded by one or more of the aforementioned genes.

40. The method of claim 39, wherein the expression level of one or more of ARHGEF10L, SLC8A1, TREML1, PEAR1, SFN, CD14, AOAH, ASPRV1, EHD1, LCN2, ST3GAL6, MFSD1, PECAM1, ESAM, AFM, APCS, F12, GCA, GLOD4, GP5, HGFAC, IGF1, MMRN2, PF4V1, PFKL, POSTN, SAA4, TIMP3, YWHAG, ADAM12, ADAM19, GADD45G, FGF1, RASD1 or RGS16 is determined.

41. The method of claim 39, wherein the expression level of one or more of ARHGEF10L, SLC8A1, TREML1, PEAR1, SFN, CD14, AOAH, ASPRV1, EHD1, LCN2, ST3GAL6, MFSD1, PECAM1, ESAM, AFM, APCS, or F12 is determined.

42. The method of claim 37, wherein the gene target is a gene or gene product associated with a sensitive response.

43. The method of claim 41, wherein the gene target is gene is one or more of EMC9, IRAK4, NFATC2, PLA2G10, SARM1, PIP5K1A, PDIA4, ARPC4, BNIP3, CCDC65, CENPH, CHPT1, COMMD3, DR1, FGD1, FIGNL1, GGNBP2, GNAO1, H2AFZ, HSPB1, IL17RB, IL17RC, ILF2, PDCD6, PI3, POFUT2, RABGEF1, RBM4, SKA2, SLC38A2, SNRPA1, SPCS2, TAF1D, TNFSF10, ZNF302, ZNF333, ZNF419, ZNF624, ZNF677, ZNF720, LPA, B4GAT1, CDH6, CUTA, DMBT1, FCGBP, OSMR, SSC5D, TNXB, BMP4, DPP4, MYLK2, MYLK4, ADRB1, ALDH1A2, ANKRD55, CLU, CTDSPL, CTNNAL1, DHFR, DNAJB4, DPYD, FZD10, GAB1, HCRTR1, IL7, LRRC1, MYLIP, NR1H3, PCGF5, PLSCR4, RAB11FIP1, RPGR, RUNX1T1, SLC40A1, SLCO2A1, STAT1, SULT1B1, TBC1D8, TGM2 or WNT4, or the gene product is an RNA or polypeptide encoded by one or more of the aforementioned genes.

44. The method of claim 43, wherein the expression level of one or more of EMC9, IRAK4, NFATC2, PLA2G10, SARM1, PIP5K1A, PDIA4, ARPC4, BNIP3, CCDC65, CENPH, CHPT1, COMMD3, DR1, FGD1, FIGNL1, GGNBP2, GNAO1, H2AFZ, HSPB1, IL17RB, IL17RC, ILF2, PDCD6, PI3, POFUT2, RABGEF1, RBM4, SKA2, SLC38A2, SNRPA1, SPCS2, TAF1D, TNFSF10, ZNF302, ZNF333, ZNF419, ZNF624, ZNF677, ZNF720, LPA, B4GAT1, CDH6, CUTA, DMBT1, FCGBP, OSMR, SSC5D, TNXB, BMP4, DPP4, MYLK2, MYLK4, ADRB1, ALDH1A2, ANKRD55, CLU, CTDSPL, CTNNAL1, DHFR, DNAJB4, DPYD, FZD10, GAB1, HCRTR1, IL7, LRRC1, MYLIP, NR1H3, PCGF5, PLSCR4, RAB11FIP1, RPGR, RUNX1T1, SLC40A1, SLCO2A1, STAT1, SULT1B1, TBC1D8, TGM2 or WNT4 is determined.

45. The method of claim 43, wherein the expression level of one or more of EMC9, IRAK4, NFATC2, PLA2G10, SARM1, PIP5K1A, PDIA4, ARPC4, BNIP3, CCDC65, CENPH, CHPT1, COMMD3, DR1, FGD1, FIGNL1, GGNBP2, GNAO1, H2AFZ, HSPB1, IL17RB, IL17RC, ILF2, PDCD6, PI3, POFUT2, RABGEF1, RBM4, SKA2, SLC38A2, SNRPA1, SPCS2, TAF1D, TNFSF10, ZNF302, ZNF333, ZNF419, ZNF624, ZNF677, ZNF720, LPA, B4GAT1, CDH6, CUTA, DMBT1, or FCGBP is determined.

46. The method of claim 43, wherein the expression level of one or more of EMC9, IRAK4, NFATC2, PLA2G10, SARM1, PIP5K1A, PDIA4, ARPC4, BNIP3, CCDC65, CENPH, CHPT1, COMMD3, DR1, FGD1, FIGNL1, GGNBP2, GNAO1, H2AFZ, or HSPB1 is determined.

47. The method of claim 37, wherein the expression level is an mRNA expression level.

48. The method of claim 47, wherein the mRNA expression level is determined by PCR, RT-PCR, RNA-seq, gene expression profiling, serial analysis of gene expression, or microarray analysis.

49. The method of claim 48, wherein the mRNA expression level is determined by RNA-seq.

50. The method of claim 37, wherein the expression level is a protein expression level.

51. The method of claim 50, wherein the protein expression is determined by western blot, immunohistochemistry, or mass spectrometry.

52. A method for treating a disease of immune dysregulation in a mammal, the method comprising administering to the mammal a therapeutically effective amount of a modulating agent or subjecting the mammal to a modulating process, wherein the modulating agent or process alters the expression or activity of EMC9 to an inflammatory stimulus.

53. A method for altering an immune response in a mammal, the method comprising administering to the mammal a therapeutically effective amount of a modulating agent or subjecting the mammal to a modulating process, wherein the modulating agent or process alters the expression or activity of EMC9 to an inflammatory stimulus.

54. The method of claim 52 or 53, wherein the modulating agent or process increases the expression or activity of EMC9.

55. The method of claim 54, wherein the modulating agent is an activator of EMC9, an agonist antibody of EMC9, a cell expressing EMC9, a mimetic of EMC9, a derivative or recombinant form of EMC9, or a soluble form of EMC9.

56. The method of claim 55, wherein the modulating process is overexpression of EMC9 or overexpression or depletion of a signal, signaling regulator, or receptor associated with EMC9.

57. The method of claim 52, wherein the modulating agent or process decreases the expression or activity of EMC9.

58. The method of claim 57, wherein the modulating agent is an inhibitor of EMC9, an inhibiting or neutralizing antibody of EMC9, a moiety blocking a receptor associated with the gene target, or a RNAi molecule targeting EMC9.

59. The method of claim 58, wherein the modulating process is depletion of cells expressing EMC9, overexpression or depletion of a signal, signaling regulator, or receptor associated with EMC9, depletion of a ligand of EMC9, or genetic ablation of EMC9.

60. The method of claim 52 or claim 53, wherein the modulating agent is a protein, a peptide, a polynucleotide, a small molecule, or a chemical.

61. The method of claim 52 or claim 53, wherein the modulating agent is delivered orally, by injection, by a lipid-based carrier, or by a nanoparticle-type carrier.

62. The method of claim 52 or claim 53, wherein the modulating agent is delivered by an expression vector or plasmid containing a gene insert that codes for the modulating agent.

63. The method of claim 52 or claim 53, wherein the modulating agent is associated with a gene editing technology.

64. The method of claim 52 or claim 53, wherein the inflammatory stimulus is a bacterial lipopolysaccharide (LPS).

65. The method of claim 52 or claim 54, wherein the disease of immune dysregulation is an inflammatory disease.

66. The method of claim 65, wherein the inflammatory disease is a dermatological disorder.

67. The method of claim 66, wherein the dermatological disorder is atopic dermatitis, alopecia areata, bulloid pemphigus, chronic eczema, dermatomyositis, erythema nodosum, epidermolysis bullosa, hydradenitis suppurativa, lichen planus, pemphigus vulgaris, psoriasis, pyoderma gangrenosum, scleroderma, or vitiligo.

68. The method of claim 65, wherein the inflammatory disease is sepsis, achalasia, acute or ischemic colitis, acute respiratory distress syndrome, allergy, allograft rejection, alveolitis, Alzheimer's disease, a neurological disease associated with amyloidosis, amebiasis, anaphylactic shock, angiitis, ankylosing spondylitis, appendicitis, arteritis, arthralgia, arthritides, asthma, atherosclerosis, Behcet's syndrome, Berger's disease, bronchiolitis, bronchitis, burns, cachexia, candidiasis, cerebral embolism, cerebral infarction, cholangitis, cholecystitis, chronic fatigue syndrome, celiac disease, Crohn's disease, congestive heart failure, Crohn's disease, cystic fibrosis, Dengue fever, dermatitis, dermatomyositis, disseminated bacteremia, diverticulitis, duodenal ulcers, emphysema, encephalitis, endocarditis, endotoxic shock, enteritis, eosinophilic granuloma, epididymitis, epiglottitis, fasciitis, filariasis, gastric ulcers, Goodpasture's syndrome, gout, graft-versus-host disease, granulomatosis, Guillan-Barre syndrome, hay fever, hepatitis, hepatitis B virus infection, hepatitis C virus infection, herpes infection, HIV infection, Hodgkin's disease, hydatid cysts, hyperpyrexia, immune complex disease, influenza, juvenile idiopathic arthritis, malaria, meningitis, multiple sclerosis, a multiple sclerosis-associated demyelination disease, myasthenia gravis, myocardial ischemia, myocarditis, neuralgia, neuritis, organ ischemia, organ necrosis, osteomyelitis, Paget's disease, pancreatitis, ulcerative pancreatitis, pseudomembranous colitis, pancreatitis, paralysis, peptic ulcers, periarteritis nodosa, pericarditis, periodontal disease, peritonitis, pharyngitis, pleurisy, pneumonitis, pneumonoultramicroscopicsilicovolcanokoniosis, polymyalgia rheumatica, prostatitis, psoriatic arthritis, pseudomembranous Reiter's syndrome, reperfusion injury, respiratory syncytial virus infection, rheumatic fever, rheumatoid arthritis, rhinitis, sarcoidosis, septic abortion, septicemia, sinusitis, forms of cancer having an inflammatory component, spinal cord injury, sunburn, synovitis, systemic lupus erythematosus, systemic lupus erythrocytosis, thrombophlebitis, thyroiditis, Type I diabetes, ulcerative colitis, urethritis, urticaria, uveitis, vaginitis, vasculitis, warts, wheals, or Whipple's disease.

69. The method of claim 68, wherein the inflammatory disease is sepsis.

70. The method of claim 52 and claim 54, wherein the disease of immune dysregulation is secondary induced inflammation.

71. The method of claim 70, wherein the secondary induced inflammation is associated with a bacterial infection, a viral infection, a fungal infection, or a parasitic infection.

72. The method of claim 65, wherein the inflammatory disease is allograft rejection and wherein the composition further comprises an immunosuppressant used to inhibit allograft rejection.

73. The method of claim 65, wherein the inflammatory disease is a xenograft rejection and wherein the composition further comprises an immunosuppressant used to inhibit xenograft rejection.

74. The method of claim 53, where the mammal has a cancer and the alteration of the expression or activity of the gene target increases an innate immune response of the mammal

75. The method of claim 52, wherein the mammal is a human.

76. A method for treating a disease of immune dysregulation in a subject, said method comprising administering to the subject a therapeutically effective amount of a gliptin, benzamil, or ISA2011B.

77. The method of claim 76, wherein the gliptin is vildagliptin, saxagliptin, alogliptin, linagliptin, sitagliptin, gemigliptin, anagliptin, and teneligliptin.

78. The method of claim 77, wherein saxagliptin is administered.

79. The method of claim 76, wherein benzamil is administered.

80. The method of claim 76, wherein ISA2011B is administered.

81. The method of claim 76, wherein the disease of immune dysregulation is an inflammatory disease.

82. The method of claim 81, wherein the inflammatory disease is a dermatological disorder.

83. The method of claim 82, wherein the dermatological disorder is atopic dermatitis, alopecia areata, bulloid pemphigus, chronic eczema, dermatomyositis, erythema nodosum, epidermolysis bullosa, hydradenitis suppurativa, lichen planus, pemphigus vulgaris, psoriasis, pyoderma gangrenosum, scleroderma, or vitiligo.

84. The method of claim 81, wherein the inflammatory disease is sepsis, achalasia, acute or ischemic colitis, acute respiratory distress syndrome, allergy, allograft rejection, alveolitis, Alzheimer's disease, a neurological disease associated with amyloidosis, amebiasis, anaphylactic shock, angiitis, ankylosing spondylitis, appendicitis, arteritis, arthralgia, arthritides, asthma, atherosclerosis, Behcet's syndrome, Berger's disease, bronchiolitis, bronchitis, burns, cachexia, candidiasis, cerebral embolism, cerebral infarction, cholangitis, cholecystitis, chronic fatigue syndrome, celiac disease, Crohn's disease, congestive heart failure, Crohn's disease, cystic fibrosis, Dengue fever, dermatitis, dermatomyositis, disseminated bacteremia, diverticulitis, duodenal ulcers, emphysema, encephalitis, endocarditis, endotoxic shock, enteritis, eosinophilic granuloma, epididymitis, epiglottitis, fasciitis, filariasis, gastric ulcers, Goodpasture's syndrome, gout, graft-versus-host disease, granulomatosis, Guillan-Barre syndrome, hay fever, hepatitis, hepatitis B virus infection, hepatitis C virus infection, herpes infection, HIV infection, Hodgkin's disease, hydatid cysts, hyperpyrexia, immune complex disease, influenza, juvenile idiopathic arthritis, malaria, meningitis, multiple sclerosis, a multiple sclerosis-associated demyelination disease, myasthenia gravis, myocardial ischemia, myocarditis, neuralgia, neuritis, organ ischemia, organ necrosis, osteomyelitis, Paget's disease, pancreatitis, ulcerative pancreatitis, pseudomembranous colitis, pancreatitis, paralysis, peptic ulcers, periarteritis nodosa, pericarditis, periodontal disease, peritonitis, pharyngitis, pleurisy, pneumonitis, pneumonoultramicroscopicsilicovolcanokoniosis, polymyalgia rheumatica, prostatitis, psoriatic arthritis, pseudomembranous Reiter's syndrome, reperfusion injury, respiratory syncytial virus infection, rheumatic fever, rheumatoid arthritis, rhinitis, sarcoidosis, septic abortion, septicemia, sinusitis, forms of cancer having an inflammatory component, spinal cord injury, sunburn, synovitis, systemic lupus erythematosus, systemic lupus erythrocytosis, thrombophlebitis, thyroiditis, Type I diabetes, ulcerative colitis, urethritis, urticaria, uveitis, vaginitis, vasculitis, warts, wheals, or Whipple's disease.

85. The method of claim 84, wherein the inflammatory disease is sepsis.

86. The method of claim 76, wherein the disease of immune dysregulation is secondary induced inflammation.

87. The method of claim 86, wherein the secondary induced inflammation is associated with a bacterial infection, a viral infection, a fungal infection, or a parasitic infection.

88. The method of claim 81, wherein the inflammatory disease is allograft rejection and wherein the composition further comprises an immunosuppressant used to inhibit allograft rejection.

89. The method of claim 81, wherein the inflammatory disease is a xenograft rejection and wherein the composition further comprises an immunosuppressant used to inhibit xenograft rejection.

90. The method of claim 76, where the mammal has a cancer and the alteration of the expression or activity of the gene target increases an innate immune response of the mammal

91. The method of claim 76, wherein the mammal is a human.

The application's sequence listing, which the Patent Office published only in electronic form, follows.

SEQUENCE LISTING (266 sequences)

SEQ ID NO: 1 - protein, 208 aa, Homo sapiens
MGEVEISALAYVKMCLHAARYPHAAVNGLFLAPAPRSGECLCLTDCVPLFHSHLALSVMLEVALNQVDVWGAQAGLVVAGYYHANAAVNDQSPGPLALKIAGRIAEFFPDAVLIMLDNQKLVPQPRVPPVIVLENQGLRWVPKDKNLVMWRDWEESRQMVGALLEDRAHQHLVDFDCHLDDIRQDWTNQRLNTQITQWVGPTNGNGNA

SEQ ID NO: 2 - protein, 460 aa, Homo sapiens
MNKPITPSTYVRCLNVGLIRKLSDFIDPQEGWKKLAVAIKKPSGDDRYNQFHIRRFEALLQTGKSPTSELLFDWGTTNCTVGDLVDLLIQNEFFAPASLLLPDAVPKTANTLPSKEAITVQQKQMPFCDKDRTLMTPVQNLEQSYMPPDSSSPENKSLEVSDTRFHSFSFYELKNVTNNFDERPISVGGNKMGEGGFGVVYKGYVNNTTVAVKKLAAMVDITTEELKQQFDQEIKVMAKCQHENLVELLGFSSDGDDLCLVYVYMPNGSLLDRLSCLDGTPPLSWHMRCKIAQGAANGINFLHENHHIHRDIKSANILLDEAFTAKISDFGLARASEKFAQTVMTSRIVGTTAYMAPEALRGEITPKSDIYSFGVVLLEIITGLPAVDEHREPQLLLDIKEEIEDEEKTIEDYIDKKMNDADSTSVEAMYSVASQCLHEKKNKRPDIKKVQQLLQEMTAS

SEQ ID NO: 3 - protein, 336 aa, Homo sapiens
MPFCDKDRTLMTPVQNLEQSYMPPDSSSPENKSLEVSDTRFHSFSFYELKNVTNNFDERPISVGGNKMGEGGFGVVYKGYVNNTTVAVKKLAAMVDITTEELKQQFDQEIKVMAKCQHENLVELLGFSSDGDDLCLVYVYMPNGSLLDRLSCLDGTPPLSWHMRCKIAQGAANGINFLHENHHIHRDIKSANILLDEAFTAKISDFGLARASEKFAQTVMTSRIVGTTAYMAPEALRGEITPKSDIYSFGVVLLEIITGLPAVDEHREPQLLLDIKEEIEDEEKTIEDYIDKKMNDADSTSVEAMYSVASQCLHEKKNKRPDIKKVQQLLQEMTAS

SEQ ID NO: 4 - protein, 925 aa, Homo sapiens
MNAPERQPQPDGGDAPGHEPGGSPQDELDFSILFDYEYLNPNEEEPNAHKVASPPSGPAYPDDVLDYGLKPYSPLASLSGEPPGRFGEPDRVGPQKFLSAAKPAGASGLSPRIEITPSHELIQAVGPLRMRDAGLLVEQPPLAGVAASPRFTLPVPGFEGYREPLCLSPASSGSSASFISDTFSPYTSPCVSPNNGGPDDLCPQFQNIPAHYSPRTSPIMSPRTSLAEDSCLGRHSPVPRPASRSSSPGAKRRHSCAEALVALPPGASPQRSRSPSPQPSSHVAPQDHGSPAGYPPVAGSAVIMDALNSLATDSPCGIPPKMWKTSPDPSPVSAAPSKAGLPRHIYPAVEFLGPCEQGERRNSAPESILLVPPTWPKPLVPAIPICSIPVTASLPPLEWPLSSQSGSYELRIEVQPKPHHRAHYETEGSRGAVKAPTGGHPVVQLHGYMENKPLGLQIFIGTADERILKPHAFYQVHRITGKTVTTTSYEKIVGNTKVLEIPLEPKNNMRATIDCAGILKLRNADIELRKGETDIGRKNTRVRLVFRVHIPESSGRIVSLQTASNPIECSQRSAHELPMVERQDTDSCLVYGGQQMILTGQNFTSESKVVFTEKTTDGQQIWEMEATVDKDKSQPNMLFVEIPEYRNKHIRTPVKVNFYVINGKRKRSQPQHFTYHPVPAIKTEPTDEYDPTLICSPTHGGLGSQPYYPQHPMVAESPSCLVATMAPCQQFRTGLSSPDARYQQQNPAAVLYQRSKSLSPSLLGYQQPALMAAPLSLADAHRSVLVHAGSQGQSSALLHPSPTNQQASPVIHYSPTNQQLRCGSHQEFQHIMYCENFAPGTTRPGPPPVSQGQRLSPGSYPTVIQQQNATSQRAAKNGPPVSDQKEVLPAGVTIKQEQNLDQTYLDDVNEIIRKEFSGPPARNQT

SEQ ID NO: 5 - protein, 921 aa, Homo sapiens
MNAPERQPQPDGGDAPGHEPGGSPQDELDFSILFDYEYLNPNEEEPNAHKVASPPSGPAYPDDVLDYGLKPYSPLASLSGEPPGRFGEPDRVGPQKFLSAAKPAGASGLSPRIEITPSHELIQAVGPLRMRDAGLLVEQPPLAGVAASPRFTLPVPGFEGYREPLCLSPASSGSSASFISDTFSPYTSPCVSPNNGGPDDLCPQFQNIPAHYSPRTSPIMSPRTSLAEDSCLGRHSPVPRPASRSSSPGAKRRHSCAEALVALPPGASPQRSRSPSPQPSSHVAPQDHGSPAGYPPVAGSAVIMDALNSLATDSPCGIPPKMWKTSPDPSPVSAAPSKAGLPRHIYPAVEFLGPCEQGERRNSAPESILLVPPTWPKPLVPAIPICSIPVTASLPPLEWPLSSQSGSYELRIEVQPKPHHRAHYETEGSRGAVKAPTGGHPVVQLHGYMENKPLGLQIFIGTADERILKPHAFYQVHRITGKTVTTTSYEKIVGNTKVLEIPLEPKNNMRATIDCAGILKLRNADIELRKGETDIGRKNTRVRLVFRVHIPESSGRIVSLQTASNPIECSQRSAHELPMVERQDTDSCLVYGGQQMILTGQNFTSESKVVFTEKTTDGQQIWEMEATVDKDKSQPNMLFVEIPEYRNKHIRTPVKVNFYVINGKRKRSQPQHFTYHPVPAIKTEPTDEYDPTLICSPTHGGLGSQPYYPQHPMVAESPSCLVATMAPCQQFRTGLSSPDARYQQQNPAAVLYQRSKSLSPSLLGYQQPALMAAPLSLADAHRSVLVHAGSQGQSSALLHPSPTNQQASPVIHYSPTNQQLRCGSHQEFQHIMYCENFAPGTTRPGPPPVSQGQRLSPGSYPTVIQQQNATSQRAAKNGPPVSDQKEVLPAGVTIKQEQNLDQTYLDDELIDTHLSWIQNIL

SEQ ID NO: 6 - protein, 901 aa, Homo sapiens
MQREAAFRLGHCHPLRIMGSVDQEEPNAHKVASPPSGPAYPDDVLDYGLKPYSPLASLSGEPPGRFGEPDRVGPQKFLSAAKPAGASGLSPRIEITPSHELIQAVGPLRMRDAGLLVEQPPLAGVAASPRFTLPVPGFEGYREPLCLSPASSGSSASFISDTFSPYTSPCVSPNNGGPDDLCPQFQNIPAHYSPRTSPIMSPRTSLAEDSCLGRHSPVPRPASRSSSPGAKRRHSCAEALVALPPGASPQRSRSPSPQPSSHVAPQDHGSPAGYPPVAGSAVIMDALNSLATDSPCGIPPKMWKTSPDPSPVSAAPSKAGLPRHIYPAVEFLGPCEQGERRNSAPESILLVPPTWPKPLVPAIPICSIPVTASLPPLEWPLSSQSGSYELRIEVQPKPHHRAHYETEGSRGAVKAPTGGHPVVQLHGYMENKPLGLQIFIGTADERILKPHAFYQVHRITGKTVTTTSYEKIVGNTKVLEIPLEPKNNMRATIDCAGILKLRNADIELRKGETDIGRKNTRVRLVFRVHIPESSGRIVSLQTASNPIECSQRSAHELPMVERQDTDSCLVYGGQQMILTGQNFTSESKVVFTEKTTDGQQIWEMEATVDKDKSQPNMLFVEIPEYRNKHIRTPVKVNFYVINGKRKRSQPQHFTYHPVPAIKTEPTDEYDPTLICSPTHGGLGSQPYYPQHPMVAESPSCLVATMAPCQQFRTGLSSPDARYQQQNPAAVLYQRSKSLSPSLLGYQQPALMAAPLSLADAHRSVLVHAGSQGQSSALLHPSPTNQQASPVIHYSPTNQQLRCGSHQEFQHIMYCENFAPGTTRPGPPPVSQGQRLSPGSYPTVIQQQNATSQRAAKNGPPVSDQKEVLPAGVTIKQEQNLDQTYLDDELIDTHLSWIQNIL

SEQ ID NO: 7 - protein, 905 aa, Homo sapiens
MQREAAFRLGHCHPLRIMGSVDQEEPNAHKVASPPSGPAYPDDVLDYGLKPYSPLASLSGEPPGRFGEPDRVGPQKFLSAAKPAGASGLSPRIEITPSHELIQAVGPLRMRDAGLLVEQPPLAGVAASPRFTLPVPGFEGYREPLCLSPASSGSSASFISDTFSPYTSPCVSPNNGGPDDLCPQFQNIPAHYSPRTSPIMSPRTSLAEDSCLGRHSPVPRPASRSSSPGAKRRHSCAEALVALPPGASPQRSRSPSPQPSSHVAPQDHGSPAGYPPVAGSAVIMDALNSLATDSPCGIPPKMWKTSPDPSPVSAAPSKAGLPRHIYPAVEFLGPCEQGERRNSAPESILLVPPTWPKPLVPAIPICSIPVTASLPPLEWPLSSQSGSYELRIEVQPKPHHRAHYETEGSRGAVKAPTGGHPVVQLHGYMENKPLGLQIFIGTADERILKPHAFYQVHRITGKTVTTTSYEKIVGNTKVLEIPLEPKNNMRATIDCAGILKLRNADIELRKGETDIGRKNTRVRLVFRVHIPESSGRIVSLQTASNPIECSQRSAHELPMVERQDTDSCLVYGGQQMILTGQNFTSESKVVFTEKTTDGQQIWEMEATVDKDKSQPNMLFVEIPEYRNKHIRTPVKVNFYVINGKRKRSQPQHFTYHPVPAIKTEPTDEYDPTLICSPTHGGLGSQPYYPQHPMVAESPSCLVATMAPCQQFRTGLSSPDARYQQQNPAAVLYQRSKSLSPSLLGYQQPALMAAPLSLADAHRSVLVHAGSQGQSSALLHPSPTNQQASPVIHYSPTNQQLRCGSHQEFQHIMYCENFAPGTTRPGPPPVSQGQRLSPGSYPTVIQQQNATSQRAAKNGPPVSDQKEVLPAGVTIKQEQNLDQTYLDDVNEIIRKEFSGPPARNQT

SEQ ID NO: 8 - protein, 702 aa, Homo sapiens
MSPRTSLAEDSCLGRHSPVPRPASRSSSPGAKRRHSCAEALVALPPGASPQRSRSPSPQPSSHVAPQDHGSPAGYPPVAGSAVIMDALNSLATDSPCGIPPKMWKTSPDPSPVSAAPSKAGLPRHIYPAVEFLGPCEQGERRNSAPESILLVPPTWPKPLVPAIPICSIPVTASLPPLEWPLSSQSGSYELRIEVQPKPHHRAHYETEGSRGAVKAPTGGHPVVQLHGYMENKPLGLQIFIGTADERILKPHAFYQVHRITGKTVTTTSYEKIVGNTKVLEIPLEPKNNMRATIDCAGILKLRNADIELRKGETDIGRKNTRVRLVFRVHIPESSGRIVSLQTASNPIECSQRSAHELPMVERQDTDSCLVYGGQQMILTGQNFTSESKVVFTEKTTDGQQIWEMEATVDKDKSQPNMLFVEIPEYRNKHIRTPVKVNFYVINGKRKRSQPQHFTYHPVPAIKTEPTDEYDPTLICSPTHGGLGSQPYYPQHPMVAESPSCLVATMAPCQQFRTGLSSPDARYQQQNPAAVLYQRSKSLSPSLLGYQQPALMAAPLSLADAHRSVLVHAGSQGQSSALLHPSPTNQQASPVIHYSPTNQQLRCGSHQEFQHIMYCENFAPGTTRPGPPPVSQGQRLSPGSYPTVIQQQNATSQRAAKNGPPVSDQKEVLPAGVTIKQEQNLDQTYLDDELIDTHLSWIQNIL

SEQ ID NO: 9 - protein, 165 aa, Homo sapiens
MGPLPVCLPIMLLLLLPSLLLLLLLPGPGSGEASRILRVHRRGILELAGTVGCVGPRTPIAYMKYGCFCGLGGHGQPRDAIDWCCHGHDCCYTRAEEAGCSPKTERYSWQCVNQSVLCGPAENKCQELLCKCDQEIANCLAQTEYNLKYLFYPQFLCEPDSPKCD

SEQ ID NO: 10 - protein, 724 aa, Homo sapiens
MVLTLLLSAYKLCRFFAMSGPRPGAERLAVPGPDGGGGTGPWWAAGGRGPREVSPGAGTEVQDALERALPELQQALSALKQAGGARAVGAGLAEVFQLVEEAWLLPAVGREVAQGLCDAIRLDGGLDLLLRLLQAPELETRVQAARLLEQILVAENRDRVARIGLGVILNLAKEREPVELARSVAGILEHMFKHSEETCQRLVAAGGLDAVLYWCRRTDPALLRHCALALGNCALHGGQAVQRRMVEKRAAEWLFPLAFSKEDELLRLHACLAVAVLATNKEVEREVERSGTLALVEPLVASLDPGRFARCLVDASDTSQGRGPDDLQRLVPLLDSNRLEAQCIGAFYLCAEAAIKSLQGKTKVFSDIGAIQSLKRLVSYSTNGTKSALAKRALRLLGEEVPRPILPSVPSWKEAEVQTWLQQIGFSKYCESFREQQVDGDLLLRLTEEELQTDLGMKSGITRKRFFRELTELKTFANYSTCDRSNLADWLGSLDPRFRQYTYGLVSCGLDRSLLHRVSEQQLLEDCGIHLGVHRARILTAAREMLHSPLPCTGGKPSGDTPDVFISYRRNSGSQLASLLKVHLQLHGFSVFIDVEKLEAGKFEDKLIQSVMGARNFVLVLSPGALDKCMQDHDCKDWVHKEIVTALSCGKNIVPIIDGFEWPEPQVLPEDMQAVLTFNGIKWSHEYQEATIEKIIRFLQGRSSRDSSAGSDTSLEGAAPMGPT

SEQ ID NO: 11 - protein, 690 aa, Homo sapiens
MGAVARAHGGLRVARARESVAGGRHRGAGRPGARAAGAAAGLVRAEAGGRRAGRGRRPGRGLPTGGGGLAAAAVGREVAQGLCDAIRLDGGLDLLLRLLQAPELETRVQAARLLEQILVAENRDRVARIGLGVILNLAKEREPVELARSVAGILEHMFKHSEETCQRLVAAGGLDAVLYWCRRTDPALLRHCALALGNCALHGGQAVQRRMVEKRAAEWLFPLAFSKEDELLRLHACLAVAVLATNKEVEREVERSGTLALVEPLVASLDPGRFARCLVDASDTSQGRGPDDLQRLVPLLDSNRLEAQCIGAFYLCAEAAIKSLQGKTKVFSDIGAIQSLKRLVSYSTNGTKSALAKRALRLLGEEVPRPILPSVPSWKEAEVQTWLQQIGFSKYCESFREQQVDGDLLLRLTEEELQTDLGMKSGITRKRFFRELTELKTFANYSTCDRSNLADWLGSLDPRFRQYTYGLVSCGLDRSLLHRVSEQQLLEDCGIHLGVHRARILTAAREMLHSPLPCTGGKPSGDTPDVFISYRRNSGSQLASLLKVHLQLHGFSVFIDVEKLEAGKFEDKLIQSVMGARNFVLVLSPGALDKCMQDHDCKDWVHKEIVTALSCGKNIVPIIDGFEWPEPQVLPEDMQAVLTFNGIKWSHEYQEATIEKIIRFLQGRSSRDSSAGSDTSLEGAAPMGPT

SEQ ID NO: 12 - protein, 562 aa, Homo sapiens
MASASSGPSSSVGFSSFDPAVPSCTLSSAASGIKRPMASEVLEARQDSYISLVPYASGMPIKKIGHRSVDSSGETTYKKTTSSALKGAIQLGITHTVGSLSTKPERDVLMQDFYVVESIFFPSEGSNLTPAHHYNDFRFKTYAPVAFRYFRELFGIRPDDYLYSLCSEPLIELCSSGASGSLFYVSSDDEFIIKTVQHKEAEFLQKLLPGYYMNLNQNPRTLLPKFYGLYCVQAGGKNIRIVVMNNLLPRSVKMHIKYDLKGSTYKRRASQKEREKPLPTFKDLDFLQDIPDGLFLDADMYNALCKTLQRDCLVLQSFKIMDYSLLMSIHNIDHAQREPLSSETQYSVDTRRPAPQKALYSTAMESIQGEARRGGTMETDDHMGGIPARNSKGERLLLYIGIIDILQSYRFVKKLEHSWKALVHDGDTVSVHRPGFYAERFQRFMCNTVFKKIPLKPSPSKKFRSGSSFSRRAGSSGNSCITYQPSVSGEHKAQVTTKAEVEPGVHLGRPDVLPQTPPLEEISEGSPIPDPSFSPLVGETLQMLTTSTTLEKLEVAESEFTH

SEQ ID NO: 13 - protein, 500 aa, Homo sapiens
MASASSGPSSSVGFSSFDPAVPSCTLSSASGIKRPMASEVPYASGMPIKKIGHRSVDSSGETTYKKTTSSALKGAIQLGITHTVGSLSTKPERDVLMQDFYVVESIFFPSEGSNLTPAHHYNDFRFKTYAPVAFRYFRELFGIRPDDYLYSLCSEPLIELCSSGASGSLFYVSSDDEFIIKTVQHKEAEFLQKLLPGYYMNLNQNPRTLLPKFYGLYCVQAGGKNIRIVVMNNLLPRSVKMHIKYDLKGSTYKRRASQKEREKPLPTFKDLDFLQDIPDGLFLDADMYNALCKTLQRDCLVLQSFKIMDYSLLMSIHNIDHAQREPLSSETQYSVDTRRPAPQKALYSTAMESIQGEARRGGTMETDDHMGGIPARNSKGERLLLYIGIIDILQSYRFVKKLEHSWKALVHDGDTVSVHRPGFYAERFQRFMCNTVFKKIPCVHLGRPDVLPQTPPLEEISEGSPIPDPSFSPLVGETLQMLTTSTTLEKLEVAESEFTH

SEQ ID NO: 14 - protein, 549 aa, Homo sapiens
MASASSGPSSSVGFSSFDPAVPSCTLSSASGIKRPMASEVPYASGMPIKKIGHRSVDSSGETTYKKTTSSALKGAIQLGITHTVGSLSTKPERDVLMQDFYVVESIFFPSEGSNLTPAHHYNDFRFKTYAPVAFRYFRELFGIRPDDYLYSLCSEPLIELCSSGASGSLFYVSSDDEFIIKTVQHKEAEFLQKLLPGYYMNLNQNPRTLLPKFYGLYCVQAGGKNIRIVVMNNLLPRSVKMHIKYDLKGSTYKRRASQKEREKPLPTFKDLDFLQDIPDGLFLDADMYNALCKTLQRDCLVLQSFKIMDYSLLMSIHNIDHAQREPLSSETQYSVDTRRPAPQKALYSTAMESIQGEARRGGTMETDDHMGGIPARNSKGERLLLYIGIIDILQSYRFVKKLEHSWKALVHDGDTVSVHRPGFYAERFQRFMCNTVFKKIPLKPSPSKKFRSGSSFSRRAGSSGNSCITYQPSVSGEHKAQVTTKAEVEPGVHLGRPDVLPQTPPLEEISEGSPIPDPSFSPLVGETLQMLTTSTTLEKLEVAESEFTH

SEQ ID NO: 15 - protein, 522 aa, Homo sapiens
MASASSGPSSSVGFSSFDPAVPSCTLSSAASGIKRPMASEVPYASGMPIKKIGHRSVDSSGETTYKKTTSSALKGAIQLGITHTVGSLSTKPERDVLMQDFYVVESIFFPSEGSNLTPAHHYNDFRFKTYAPVAFRYFRELFGIRPDDYLYSLCSEPLIELCSSGASGSLFYVSSDDEFIIKTVQHKEAEFLQKLLPGYYMNLNQNPRTLLPKFYGLYCVQAGGKNIRIVVMNNLLPRSVKMHIKYDLKGSTYKRRASQKEREKPLPTFKDLDFLQDIPDGLFLDADMYNALCKTLQRDCLVLQSFKIMDYSLLMSIHNIDHAQREPLSSETQYSVDTRRPAPQKALYSTAMESIQGEARRGGTMETDDQFVKKLEHSWKALVHDGDTVSVHRPGFYAERFQRFMCNTVFKKIPLKPSPSKKFRSGSSFSRRAGSSGNSCITYQPSVSGEHKAQVTTKAEVEPGVHLGRPDVLPQTPPLEEISEGSPIPDPSFSPLVGETLQMLTTSTTLEKLEVAESEFTH

SEQ ID NO: 16 - protein, 645 aa, Homo sapiens
MRPRKAFLLLLLLGLVQLLAVAGAEGPDEDSSNRENAIEDEEEEEEEDDDEEEDDLEVKEENGVLVLNDANFDNFVADKDTVLLEFYAPWCGHCKQFAPEYEKIANILKDKDPPIPVAKIDATSASVLASRFDVSGYPTIKILKKGQAVDYEGSRTQEEIVAKVREVSQPDWTPPPEVTLVLTKENFDEVVNDADIILVEFYAPWCGHCKKLAPEYEKAAKELSKRSPPIPLAKVDATAETDLAKRFDVSGYPTLKIFRKGRPYDYNGPREKYGIVDYMIEQSGPPSKEILTLKQVQEFLKDGDDVIIIGVFKGESDPAYQQYQDAANNLREDYKFHHTFSTEIAKFLKVSQGQLVVMQPEKFQSKYEPRSHMMDVQGSTQDSAIKDFVLKYALPLVGHRKVSNDAKRYTRRPLVVVYYSVDFSFDYRAATQFWRSKVLEVAKDFPEYTFAIADEEDYAGEVKDLGLSESGEDVNAAILDESGKKFAMEPEEFDSDTLREFVTAFKKGKLKPVIKSQPVPKNNKGPVKVVVGKTFDSIVMDPKKDVLIEFYAPWCGHCKQLEPVYNSLAKKYKGQKGLVIAKMDATANDVPSDRYKVEGFPTIYFAPSGDKKNPVKFEGGDRDLEHLSKFIEEHATKLSRTKEEL

SEQ ID NO: 17 - protein, 168 aa, Homo sapiens
MTATLRPYLSAVRATLQAALCLENFSSQVVERHNKPEVEVRSSKELLLQPVTISRNEKEKVLIEGSINSVRVSIAVKQADEIEKILCHKFMRFMMMRAENFFILRRKPVEGYDISFLITNFHTEQMYKHKLVDFVIHFMEEIDKEISEMKLSVNARARIVAEEFLKNF

SEQ ID NO: 18 - protein, 625 aa, Homo sapiens
MTATLRPYLSAVRATLQAALCLENFSSQVVERHNKPEVEVRSSKELLLQPVTISRNEKEKVLIEGSINSVRVSIAVKQADEIEKILCHKFMRFMMMRAENFFILRRKPVEQKKIFTIQGCYPVIRCLLRRRGWVEKKMVHRSGPTLLPPQKDLDSSAMGDSDTTEDEDEDEDEEFQPSQLFDFDDLLKFDDLDGTHALMVGLCLNLRNLPWFDEVDANSFFPRCYCLGAEDDKKAFIGDKQPKKQEKNPVLVSPEFVDEALCACEEYLSNLAHMDIDKDLEAPLYLTPEGWSLFLQRYYQVVHEGAELRHLDTQVQRCEDILQQLQAVVPQIDMEGDRNIWIVKPGAKSRGRGIMCMDHLEEMLKLVNGNPVVMKDGKWVVQKYIERPLLIFGTKFDLRQWFLVTDWNPLTVWFYRDSYIRFSTQPFSLKNLDNSVHLCNNSIQKHLENSCHRHPLLPPDNMWSSQRFQAHLQEMGAPNAWSTIIVPGMKDAVIHALQTSQDTVQCRKASFELYGADFVFGEDFQPWLIEINASPTMAPSTAVTARLCAGVQADTLRVVIDRMLDRNCDTGAFELIYKQPVTTSPASTPRPSCLLPMYSDTRARSSDDSTASWWALRPCRPQARP

SEQ ID NO: 19 - protein, 187 aa, Homo sapiens
MVREPGPRPGTPGCSASGQWTATLRPYLSAVRATLQAALCLENFSSQVVERHNKPEVEVRSSKELLLQPVTISRNEKEKVLIEGSINSVRVSIAVKQADEIEKILCHKFMRFMMMRAENFFILRRKPVEGYDISFLITNFHTEQMYKHKLVDFVIHFMEEIDKEISEMKLSVNARARIVAEEFLKNF

SEQ ID NO: 20 - protein, 78 aa, Homo sapiens
MRFMMMRAENFFILRRKPVEGYDISFLITNFHTEQMYKHKLVDFVIHFMEEIDKEISEMKLSVNARARIVAEEFLKNF

SEQ ID NO: 21 - protein, 259 aa, Homo sapiens
MGDAAADPPGPALPCEFLRPGCGAPLSPGAQLGRGAPTSAFPPPAAEAHPAARRGLRSPQLPSGAMSQNGAPGMQEESLQGSWVELHFSNNGNGGSVPASVSIYNGDMEKILLDAQHESGRSSSKSSHCDSPPRSQTPQDTNRASETDTHSIGEKNSSQSEEDDIERRKEVESILKKNSDWIWDWSSRPENIPPKEFLFKHPKRTATLSMRNTSVMKKGGIFSAEFLKVFLPSLLLSHLLAIGLGIYIGRRLTTSTSTF

SEQ ID NO: 22 - protein, 484 aa, Homo sapiens
MPKKEKMAKTPLSDEKQLLLFQQKLLAEEEMAKKKERLLSQFLKDKLAKEEHNSALNLNKINTQWRTVLREVKTRELHKDIEILSQTFERVVDCKDNVIKSLAKDLSEAEEQYAHALRSHLHNVDQLLALQRHRLSLLEESYNMELEALTKEFETERKTIIDQHEKEIHYLQDIFMAMEQNYIDSEYESKLEFQSMWNDLKNMNLEEKHFLRLHLENRVEDLWRKFQDVLKNYTDATEDRKAAFETLQVKDEKSSKEIEVQMKKIQKLQDAITISKGKIMIHSRESEDENRYIRNDKELVLVQLRKLKAQRTQARAASQKNLVRLTLESNATLKALRKIVDKGEKILKLAEICRKFETEEEKVLPFYSSVLTPKEQEGIQKNNLEELTEELTKVMVDYIGMENFWKRYNKVKLEQLSLQHRRAQLLDINGKLREMLKQYLDGISVSDEVLSQLNPLFIVNYQSNLLQPLSIRIAHPGDKQHPTT

SEQ ID NO: 23 - protein, 497 aa, Homo sapiens
MPKKEKMAKTPLSDEKQLLLFQQKLLAEEEMAKKKERLLSQFLKDKLAKEEHNSALNLNKINTQWRTVLREVKTRELHKDIEILSQTFERVVDCKDNVIKSLAKDLSEAEEQYAHALRSHLHNVDQLLALQRHRLSLLEESYNMELEALTKEFETERKTIIDQHEKEIHYLQDIFMAMEQNYIDSEYESKLEFQSMWNDLKNMNLEEKHFLRLHLENRVEDLWRKFQDVLKNYTDATEDRKAAFETLQVKDEKSSKEIEVQMKKIQKLQDAITISKGKIMIHSRESEDENRYIRNDKELVLVQLRKLKAQRTQARAASQKNLVRLTLESNATLKALRKIVDKGEKILKLAEICRKFETEEEKVLPFYSSVLTPKEQEGIQKNNLEELTEELTKVMVDYIGMENFWKRYNKVKLEQLSLQHRRAQLLDINGKLREMLKQYLDGISVSDEVLSQLNPLFIVNYQSNLLQPLSIRIAHPGSTSPSAPWRDQRRSFFLGSS

SEQ ID NO: 24 - protein, 247 aa, Homo sapiens
MEEQPQMQDADEPADSGGEGRAGGPPQVAGAQAACSEDRMTLLLRLRAQTKQQLLEYKSMVDASEEKTPEQIMQEKQIEAKIEDLENEIEEVKVAFEIKKLALDRMRLSTALKKNLEKISRQSSVLMDNMKHLLELNKLIMKSQQESWDLEEKLLDIRKKRLQLKQASESKLLEIQTEKNKQKIDLDSMENSERIKIIRQNLQMEIKITTVIQHVFQNLILGSKVNWAEDPALKEIVLQLEKNVDMM

SEQ ID NO: 25 - protein, 406 aa, Homo sapiens
MAAGAGAGSAPRWLRALSEPLSAAQLRRLEEHRYSAAGVSLLEPPLQLYWTWLLQWIPLWMAPNSITLLGLAVNVVTTLVLISYCPTATEEAPYWTYLLCALGLFIYQSLDAIDGKQARRTNSCSPLGELFDHGCDSLSTVFMAVGASIAARLGTYPDWFFFCSFIGMFVFYCAHWQTYVSGMLRFGKVDVTEIQIALVIVFVLSAFGGATMWDYTIPILEIKLKILPVLGFLGGVIFSCSNYFHVILHGGVGKNGSTIAGTSVLSPGLHIGLIIILAIMIYKKSATDVFEKHPCLYILMFGCVFAKVSQKLVVAHMTKSELYLQDTVFLGPGLLFLDQYFNNFIDEYVVLWMAMVISSFDMVIYFSALCLQISRHLHLNIFKTACHQAPEQVQVLSSKSHQNNMD

SEQ ID NO: 26 - protein, 218 aa, Homo sapiens
MAAGAGAGSAPRWLRALSEPLSAAQLRRLEEHRYSAAGVSLLEPPLQLYWTWLLQWIPLWMAPNSITLLGLAVNVVTTLVLISYCPTATEEAPYWTYLLCALGLFIYQSLDAIDGKQARRTNSCSPLGELFDHGCDSLSTVFMAVGASIAARLGTYPDWFFFCSFIGMFVFYCAHWQTYVSGMLRFGKVDVTEIQIALVIVFVLSAFGGATMWDYTFS

SEQ ID NO: 27 - protein, 195 aa, Homo sapiens
MELSESVQKGFQMLADPRSFDSNAFTLLLRAAFQSLLDAQADEAVLDHPDLKHIDPVVLKHCHAAAATYILEAGKHRADKSTLSTYLEDCKFDRERIELFCTEYQNNKNSLEILLGSIGRSLPHITDVSWRLEYQIKTNQLHRMYRPAYLVTLSVQNTDSPSYPEISFSCSMEQLQDLVGKLKDASKSLERATQL

SEQ ID NO: 28 - protein, 176 aa, Homo sapiens
MASSSGNDDDLTIPRAAINKMIKETLPNVRVANDARELVVNCCTEFIHLISSEANEICNKSEKKTISPEHVIQALESLGFGSYISEVKEVLQECKTVALKRRKASSRLENLGIPEEELLRQQQELFAKARQQQAELAQQEWLQMQQAAQQAQLAAASASASNQAGSSQDEEDDDDI

SEQ ID NO: 29 - protein, 961 aa, Homo sapiens
MHGHRAPGGAGPSEPEHPATNPPGAAPPACADSDPGASEPGLLARRGSGSALGGPLDPQFVGPSDTSLGAAPGHRVLPCGPSPQHHRALRFSYHLEGSQPRPGLHQGNRILVKSLSLDPGQSLEPHPEGPQRLRSDPGPPTETPSQRPSPLKRAPGPKPQVPPKPSYLQMPRMPPPLEPIPPPPSRPLPADPRVAKGLAPRAEASPSSAAVSSLIEKFEREPVIVASDRPVPGPSPGPPEPVMLPQPTSQPPVPQLPEGEASRCLFLLAPGPRDGEKVPNRDSGIDSISSPSNSEETCFVSDDGPPSHSLCPGPPALASVPVALADPHRPGSQEVDSDLEEEDDEEEEEEKDREIPVPLMERQESVELTVQQKVFHIANELLQTEKAYVSRLHLLDQVFCARLLEEARNRSSFPADVVHGIFSNICSIYCFHQQFLLPELEKRMEEWDRYPRIGDILQKLAPFLKMYGEYVKNFDRAVELVNTWTERSTQFKVIIHEVQKEEACGNLTLQHHMLEPVQRIPRYELLLKDYLLKLPHGSPDSKDAQKSLELIATAAEHSNAAIRKMERMHKLLKVYELLGGEEDIVSPTKELIKEGHILKLSAKNGTTQDRYLILFNDRLLYCVPRLRLLGQKFSVRARIDVDGMELKESSNLNLPRTFLVSGKQRSLELQARTEEEKKDWVQAINSTLLKHEQTLETFKLLNSTNREDEDTPPNSPNVDLGKRAPTPIREKEVTMCMRCQEPFNSITKRRHHCKACGHVVCGKCSEFRARLVYDNNRSNRVCTDCYVALHGVPGSSPACSQHTPQRRRSILEKQASVAAENSVICSFLHYMEKGGKGWHKAWFVVPENEPLVLYIYGAPQDVKAQRSLPLIGFEVGPPEAGERPDRRHVFKITQSHLSWYFSPETEELQRRWMAVLGRAGRGDTFCPGPTLSEDREMEEAPVAALGATAEPPESPQTRDKT

SEQ ID NO: 30 - protein, 674 aa, Homo sapiens
MQTSSSRSVHLSEWQKNYFAITSGICTGPKADAYRAQILRIQYAWANSEISQVCATKLFKKYAEKYSAIIDSDNVESGLNNYAENILTLAGSQQTDSDKWQSGLSINNVFKMSSVQKMMQAGKKFKDSLLEPALASVVIHKEATVFDLPKFSVCGSSQESDSLPNSAHDRDRTQDFPESNRLKLLQNAQPPMVTNTARTCPTFSAPVGESATAKFHVTPLFGNVKKENHSSAKENIGLNVFLSNQSCFPAACENPQRKSFYGSGTIDALSNPILNKACSKTEDNGPKEDSSLPTFKTAKEQLWVDQQKKYHQPQRASGSSYGGVKKSLGASRSRGILGKFVPPIPKQDGGEQNGGMQCKPYGAGPTEPAHPVDERLKNLEPKMIELIMNEIMDHGPPVNWEDIAGVEFAKATIKEIVVWPMLRPDIFTGLRGPPKGILLFGPPGTGKTLIGKCIASQSGATFFSISASSLTSKWVGEGEKMVRALFAVARCQQPAVIFIDEIDSLLSQRGDGEHESSRRIKTEFLVQLDGATTSSEDRILVVGATNRPQEIDEAARRRLVKRLYIPLPEASARKQIVINLMSKEQCCLSEEEIEQIVQQSDAFSGADMTQLCREASLGPIRSLQTADIATITPDQVRPIAYIDFENAFRTVRPSVSPKDLELYENWNKTFGCGK

SEQ ID NO: 31 - protein, 563 aa, Homo sapiens
MSSVQKMMQAGKKFKDSLLEPALASVVIHKEATVFDLPKFSVCGSSQESDSLPNSAHDRDRTQDFPESNRLKLLQNAQPPMVTNTARTCPTFSAPVGESATAKFHVTPLFGNVKKENHSSAKENIGLNVFLSNQSCFPAACENPQRKSFYGSGTIDALSNPILNKACSKTEDNGPKEDSSLPTFKTAKEQLWVDQQKKYHQPQRASGSSYGGVKKSLGASRSRGILGKFVPPIPKQDGGEQNGGMQCKPYGAGPTEPAHPVDERLKNLEPKMIELIMNEIMDHGPPVNWEDIAGVEFAKATIKEIVVWPMLRPDIFTGLRGPPKGILLFGPPGTGKTLIGKCIASQSGATFFSISASSLTSKWVGEGEKMVRALFAVARCQQPAVIFIDEIDSLLSQRGDGEHESSRRIKTEFLVQLDGATTSSEDRILVVGATNRPQEIDEAARRRLVKRLYIPLPEASARKQIVINLMSKEQCCLSEEEIEQIVQQSDAFSGADMTQLCREASLGPIRSLQTADIATITPDQVRPIAYIDFENAFRTVRPSVSPKDLELYENWNKTFGCGK

SEQ ID NO: 32 - protein, 697 aa, Homo sapiens
MARLVAVCRDGEEEFPFERRQIPLYIDDTLTMVMEFPDNVLNLDGHQNNGAQLKQFIQRHGMLKQQDLSIAMVVTSREVLSALSQLVPCVGCRRSVERLFSQLVESGNPALEPLTVGPKGVLSVTRSCMTDAKKLYTLFYVHGSKLNDMIDAIPKSKKNKRCQLHSLDTHKPKPLGGCWMDVWELMSQECRDEVVLIDSSCLLETLETYLRKHRFCTDCKNKVLRAYNILIGELDCSKEKGYCAALYEGLRCCPHERHIHVCCETDFIAHLLGRAEPEFAGGRRERHAKTIDIAQEEVLTCLGIHLYERLHRIWQKLRAEEQTWQMLFYLGVDALRKSFEMTVEKVQGISRLEQLCEEFSEEERVRELKQEKKRQKRKNRRKNKCVCDIPTPLQTADEKEVSQEKETDFIENSSCKACGSTEDGNTCVEVIVTNENTSCTCPSSGNLLGSPKIKKGLSPHCNGSDCGYSSSMEGSETGSREGSDVACTEGICNHDEHGDDSCVHHCEDKEDDGDSCVECWANSEENDTKGKNKKKKKKSKILKCDEHIQKLGSCITDPGNRETSGNTMHTVFHRDKTKDTHPESCCSSEKGGQPLPWFEHRKNVPQFAEPTETLFGPDSGKGAKSLVELLDESECTSDEEIFISQDEIQSFMANNQSFYSNREQYRQHLKEKFNKYCRLNDHKRPICSGWLTTAGAN

SEQ ID NO: 33 - protein, 288 aa, Homo sapiens
MARLVAVCRDGEEEFPFERRQIPLYIDDTLTMVMEFPDNVLNLDGHQNNGAQLKQFIQRHGMLKQQDLSIAMVVTSREVLSALSQLVPCVGCRRSVERLFSQLVESGNPALEPLTVGPKGVLSVTRSCMTDAKKLYTLFYVHGSKLNDMIDAIPKSKKNKRCQLHSLDTHKPKPLGGCWMDVWELMSQECRDEVVLIDSSCLLETLETYLRKHRFCTDCKNKVLRAYNILIGELDCSKEKGYCAALYEGLRCCPHERHIHVCCETDFIAHLLGRAEPEFAGGYEYVIC

SEQ ID NO: 34 - protein, 457 aa, Homo sapiens
MARLVAVCRDGEEEFPFERRQIPLYIDDTLTMVMEFPDNVLNLDGHQNNGAQLKQFIQRHGMLKQQDLSIAMVVTSREVLSALSQLVPCVGCRRSVERLFSQLVESGNPALEPLTVGPKGVLSVTRSCMTDAKKLYTLFYVHGSKLNDMIDAIPKSKKNKRCQLHSLDTHKPKPLGGCWMDVWELMSQECRDEVVLIDSSCLLETLETYLRKHRFCTDCKNKVLRAYNILIGELDCSKEKGYCAALYEGLRCCPHERHIHVCCETDFIAHLLGRAEPEFAGGRRERHAKTIDIAQEEVLTCLGIHLYERLHRIWQKLRAEEQTWQMLFYLGVDALRKSFEMTVEKVQGISRLEQLCEEFSEEERVRELKQEKKRQKRKNRRKNKCVCDIPTPLQTADEKEVSQEKETDFIENSSCKACGSTEDGNTCVEVIVTNENTSCTCPSSGNLLGSPKIKKGK

SEQ ID NO: 35 - protein, 354 aa, Homo sapiens
MGCTLSAEERAALERSKAIEKNLKEDGISAAKDVKLLLLGAGESGKSTIVKQMKIIHEDGFSGEDVKQYKPVVYSNTIQSLAAIVRAMDTLGIEYGDKERKADAKMVCDVVSRMEDTEPFSAELLSAMMRLWGDSGIQECFNRSREYQLNDSAKYYLDSLDRIGAADYQPTEQDILRTRVKTTGIVETHFTFKNLHFRLFDVGGQRSERKKWIHCFEDVTAIIFCVALSGYDQVLHEDETTNRMHESLMLFDSICNNKFFIDTSIILFLNKKDLFGEKIKKSPLTICFPEYTGPNTYEDAAAYIQAQFESKNRSPNKEIYCHMTCATDTNNIQVVFDAVTDIIIANNLRGCGLY

SEQ ID NO: 36 - protein, 354 aa, Homo sapiens
MGCTLSAEERAALERSKAIEKNLKEDGISAAKDVKLLLLGAGESGKSTIVKQMKIIHEDGFSGEDVKQYKPVVYSNTIQSLAAIVRAMDTLGIEYGDKERKADAKMVCDVVSRMEDTEPFSAELLSAMMRLWGDSGIQECFNRSREYQLNDSAKYYLDSLDRIGAADYQPTEQDILRTRVKTTGIVETHFTFKNLHFRLFDVGGQRSERKKWIHCFEDVTAIIFCVALSGYDQVLHEDETTNRMHESLKLFDSICNNKWFTDTSIILFLNKKDIFEEKIKKSPLTICFPEYTGPSAFTEAVAYIQAQYESKNKSAHKEIYTHVTCATDTNNIQFVFDAVTDVIIAKNLRGCGLY

SEQ ID NO: 37 - protein, 128 aa, Homo sapiens
MAGGKAGKDSGKAKTKAVSRSQRAGLQFPVGRIHRHLKSRTTSHGRVGATAAVYSAAILEYLTAEVLELAGNASKDLKVKRITPRHLQLAIRGDEELDSLIKATIAGGGVIPHIHKSLIGKKGQQKTV

SEQ ID NO: 38 - protein, 205 aa, Homo sapiens
MTERRVPFSLLRGPSWDPFRDWYPHSRLFDQAFGLPRLPEEWSQWLGGSSWPGYVRPLPPAAIESPAVAAPAYSRALSRQLSSGVSEIRHTADRWRVSLDVNHFAPDELTVKTKDGVVEITGKHEERQDEHGYISRCFTRKYTLPPGVDPTQVSSSLSPEGTLTVEAPMPKLATQSNEITIPVTFESRAQLGGPEAAKSDETAAK

SEQ ID NO: 39 - protein, 502 aa, Homo sapiens
MSLVLLSLAALCRSAVPREPTVQCGSETGPSPEWMLQHDLIPGDLRDLRVEPVTTSVATGDYSILMNVSWVLRADASIRLLKATKICVTGKSNFQSYSCVRCNYTEAFQTQTRPSGGKWTFSYIGFPVELNTVYFIGAHNIPNANMNEDGPSMSVNFTSPGCLDHIMKYKKKCVKAGSLWDPNITACKKNEETVEVNFTTTPLGNRYMALIQHSTIIGFSQVFEPHQKKQTRASVVIPVTGDSEGATVQLTPYFPTCGSDCIRHKGTVVLCPQTGVPFPLDNNKSKPGGWLPLLLLSLLVATWVLVAGIYLMWRHERIKKTSFSTTTLLPPIKVLVVYPSEICFHHTICYFTEFLQNHCRSEVILEKWQKKKIAEMGPVQWLATQKKAADKVVFLLSNDVNSVCDGTCGKSEGSPSENSQDLFPLAFNLFCSDLRSQIHLHKYVVVYFREIDTKDDYNALSVCPKYHLMKDATAFCAELLHVKQQVSAGKRSQACHDGCCSL

SEQ ID NO: 40 - protein, 288 aa, Homo sapiens
MSLVLLSLAALCRSAVPREPTVQCGSETGPSPEWMLQHDLIPGDLRDLRVEPVTTSVATGDYSILMNVSWVLRADASIRLLKATKICVTGKSNFQSYSCVRCNYTEAFQTQTRPSGGKWTFSYIGFPVELNTVYFIGAHNIPNANMNEDGPSMSVNFTSPGCLDHIMKYKKKCVKAGSLWDPNITACKKNEETVEVNFTTTPLGNRYMALIQHSTIIGFSQVFEPHQKKQTRASVVIPVTGDSEGATVQVKFSELLWGGKGHRRLFHHSLLLRMSSLLSNALLPADTS

SEQ ID NO: 41 - protein, 791 aa, Homo sapiens
MPVPWFLLSLALGRSPVVLSLERLVGPQDATHCSPVSLEPWGDEERLRVQFLAQQSLSLAPVTAATARTALSGLSGADGRREERGRGKSWVCLSLGGSGNTEPQKKGLSCRLWDSDILCLPGDIVPAPGPVLAPTHLQTELVLRCQKETDCDLCLRVAVHLAVHGHWEEPEDEEKFGGAADSGVEEPRNASLQAQVVLSFQAYPTARCVLLEVQVPAALVQFGQSVGSVVYDCFEAALGSEVRIWSYTQPRYEKELNHTQQLPDCRGLEVWNSIPSCWALPWLNVSADGDNVHLVLNVSEEQHFGLSLYWNQVQGPPKPRWHKNLTGPQIITLNHTDLVPCLCIQVWPLEPDSVRTNICPFREDPRAHQNLWQAARLQLLTLQSWLLDAPCSLPAEAALCWRAPGGDPCQPLVPPLSWENVTVDKVLEFPLLKGHPNLCVQVNSSEKLQLQECLWADSLGPLKDDVLLLETRGPQDNRSLCALEPSGCTSLPSKASTRAARLGEYLLQDLQSGQCLQLWDDDLGALWACPMDKYIHKRWALVWLACLLFAAALSLILLLKKDHAKGWLRLLKQDVRSGAAARGRAALLLYSADDSGFERLVGALASALCQLPLRVAVDLWSRRELSAQGPVAWFHAQRRQTLQEGGVVVLLFSPGAVALCSEWLQDGVSGPGAHGPHDAFRASLSCVLPDFLQGRAPGSYVGACFDRLLHPDAVPALFRTVPVFTLPSQLPDFLGALQQPRAPRSGRLQERAEQVSRALQPALDSYFHPPGTPAPGRGVGPGAGPGAGDGT

SEQ ID NO: 42 - protein, 720 aa, Homo sapiens
MPVPWFLLSLALGRSPVVLSLERLVGPQDATHCSPGLSCRLWDSDILCLPGDIVPAPGPVLAPTHLQTELVLRCQKETDCDLCLRVAVHLAVHGHWEEPEDEEKFGGAADSGVEEPRNASLQAQVVLSFQAYPTARCVLLEVQVPAALVQFGQSVGSVVYDCFEAALGSEVRIWSYTQPRYEKELNHTQQLPDCRGLEVWNSIPSCWALPWLNVSADGDNVHLVLNVSEEQHFGLSLYWNQVQGPPKPRWHKNLTGPQIITLNHTDLVPCLCIQVWPLEPDSVRTNICPFREDPRAHQNLWQAARLQLLTLQSWLLDAPCSLPAEAALCWRAPGGDPCQPLVPPLSWENVTVDKVLEFPLLKGHPNLCVQVNSSEKLQLQECLWADSLGPLKDDVLLLETRGPQDNRSLCALEPSGCTSLPSKASTRAARLGEYLLQDLQSGQCLQLWDDDLGALWACPMDKYIHKRWALVWLACLLFAAALSLILLLKKDHAKGWLRLLKQDVRSGAAARGRAALLLYSADDSGFERLVGALASALCQLPLRVAVDLWSRRELSAQGPVAWFHAQRRQTLQEGGVVVLLFSPGAVALCSEWLQDGVSGPGAHGPHDAFRASLSCVLPDFLQGRAPGSYVGACFDRLLHPDAVPALFRTVPVFTLPSQLPDFLGALQQPRAPRSGRLQERAEQVSRALQPALDSYFHPPGTPAPGRGVGPGAGPGAGDGT

SEQ ID NO: 43 - protein, 705 aa, Homo sapiens
MPVPWFLLSLALGRSPVVLSLERLVGPQDATHCSPGLSCRLWDSDILCLPGDIVPAPGPVLAPTHLQTELVLRCQKETDCDLCLRVAVHLAVHGHWEEPEDEEKFGGAADSGVEEPRNASLQAQVVLSFQAYPTARCVLLEVQVPAALVQFGQSVGSVVYDCFEAALGSEVRIWSYTQPRYEKELNHTQQLPALPWLNVSADGDNVHLVLNVSEEQHFGLSLYWNQVQGPPKPRWHKNLTGPQIITLNHTDLVPCLCIQVWPLEPDSVRTNICPFREDPRAHQNLWQAARLQLLTLQSWLLDAPCSLPAEAALCWRAPGGDPCQPLVPPLSWENVTVDKVLEFPLLKGHPNLCVQVNSSEKLQLQECLWADSLGPLKDDVLLLETRGPQDNRSLCALEPSGCTSLPSKASTRAARLGEYLLQDLQSGQCLQLWDDDLGALWACPMDKYIHKRWALVWLACLLFAAALSLILLLKKDHAKGWLRLLKQDVRSGAAARGRAALLLYSADDSGFERLVGALASALCQLPLRVAVDLWSRRELSAQGPVAWFHAQRRQTLQEGGVVVLLFSPGAVALCSEWLQDGVSGPGAHGPHDAFRASLSCVLPDFLQGRAPGSYVGACFDRLLHPDAVPALFRTVPVFTLPSQLPDFLGALQQPRAPRSGRLQERAEQVSRALQPALDSYFHPPGTPAPGRGVGPGAGPGAGDGT

SEQ ID NO: 44 - protein, 538 aa, Homo sapiens
MPVPWFLLSLALGRSPVVLSLERLVGPQDATHCSPGLSCRLWDSDILCLPGDIVPAPGPVLAPTHLQTELVLRCQKETDCDLCLRVAVHLAVHGHWEEPEDEEKFGGAADSGVEEPRNASLQAQVVLSFQAYPTARCVLLEVQVPAALVQFGQSVGSVVYDCFEAALGSEVRIWSYTQPRYEKELNHTQQLPALPWLNVSADGDNVHLVLNVSEEQHFGLSLYWNQVQGPPKPRWHKNLTGPQIITLNHTDLVPCLCIQVWPLEPDSVRTNICPFREDPRAHQNLWQAARLQLLTLQSWLLDAPCSLPAEAALCWRAPGGDPCQPLVPPLSWENVTVDKVLEFPLLKGHPNLCVQVNSSEKLQLQECLWADSLGPLKDDVLLLETRGPQDNRSLCALEPSGCTSLPSKASTRAARLGEYLLQDLQSGQCLQLWDDDLGALWACPMDKYIHKRWALVWLACLLFAAALSLILLLKKDHAKGWLRLLKQDVRSGGEWEQALGGGPPPGSQACASSPLPSPSVFSGSGRQGPRGSAPLLSR

SEQ ID NO: 45 - protein, 707 aa, Homo sapiens
MPVPWFLLSLALGRSPVVLSLERLVGPQDATHCSPGLSCRLWDSDILCLPGDIVPAPGPVLAPTHLQTELVLRCQKETDCDLCLRVAVHLAVHGHWEEPEDEEKFGGAADSGVEEPRNASLQAQVVLSFQAYPTARCVLLEVQVPAALVQFGQSVGSVVYDCFEAALGSEVRIWSYTQPRYEKELNHTQQLPDCRGLEVWNSIPSCWALPWLNVSADGDNVHLVLNVSEEQHFGLSLYWNQVQGPPKPRWHKNLTGPQIITLNHTDLVPCLCIQVWPLEPDSVRTNICPFREDPRAHQNLWQAARLQLLTLQSWLLDAPCSLPAEAALCWRAPGGDPCQPLVPPLSWENVTVDKVLEFPLLKGHPNLCVQVNSSEKLQLQECLWADSLGPLKDDVLLLETRGPQDNRSLCALEPSGCTSLPSKASTRAARLGEYLLQDLQSGQCLQLWDDDLGALWACPMDKYIHKRWALVWLACLLFAAALSLILLLKKDHAKAAARGRAALLLYSADDSGFERLVGALASALCQLPLRVAVDLWSRRELSAQGPVAWFHAQRRQTLQEGGVVVLLFSPGAVALCSEWLQDGVSGPGAHGPHDAFRASLSCVLPDFLQGRAPGSYVGACFDRLLHPDAVPALFRTVPVFTLPSQLPDFLGALQQPRAPRSGRLQERAEQVSRALQPALDSYFHPPGTPAPGRGVGPGAGPGAGDGT

SEQ ID NO: 46 - protein, 688 aa, Homo sapiens
MPVPWFLLSLALGRSPVVLSLERLVGPQDATHCSPGLSCRLWDSDILCLPGDIVPAPGPVLAPTHLQTELVLRCQKETDCDLCLRVAVHLAVHGHWEEPEDEEKFGGAADSGVEEPRNASLQAQVVLSFQAYPTARCVLLEVQVPAALVQFGQSVGSVVYDCFEAALGSEVRIWSYTQPRYEKELNHTQQLPALPWLNVSADGDNVHLVLNVSEEQHFGLSLYWNQVQGPPKPRWHKNLTGPQIITLNHTDLVPCLCIQVWPLEPDSVRTNICPFREDPRAHQNLWQAARLQLLTLQSWLLDAPCSLPAEAALCWRAPGGDPCQPLVPPLSWENVTVDVNSSEKLQLQECLWADSLGPLKDDVLLLETRGPQDNRSLCALEPSGCTSLPSKASTRAARLGEYLLQDLQSGQCLQLWDDDLGALWACPMDKYIHKRWALVWLACLLFAAALSLILLLKKDHAKGWLRLLKQDVRSGAAARGRAALLLYSADDSGFERLVGALASALCQLPLRVAVDLWSRRELSAQGPVAWFHAQRRQTLQEGGVVVLLFSPGAVALCSEWLQDGVSGPGAHGPHDAFRASLSCVLPDFLQGRAPGSYVGACFDRLLHPDAVPALFRTVPVFTLPSQLPDFLGALQQPRAPRSGRLQERAEQVSRALQPALDSYFHPPGTPAPGRGVGPGAGPGAGDGT

SEQ ID NO: 47 - protein, 690 aa, Homo sapiens
MPVPWFLLSLALGRSPVVLSLERLVGPQDATHCSPGLSCRLWDSDILCLPGDIVPAPGPVLAPTHLQTELVLRCQKETDCDLCLRVAVHLAVHGHWEEPEDEEKFGGAADSGVEEPRNASLQAQVVLSFQAYPTARCVLLEVQVPAALVQFGQSVGSVVYDCFEAALGSEVRIWSYTQPRYEKELNHTQQLPDCRGLEVWNSIPSCWALPWLNVSADGDNVHLVLNVSEEQHFGLSLYWNQVQGPPKPRWHKNLTGPQIITLNHTDLVPCLCIQVWPLEPDSVRTNICPFREDPRAHQNLWQAARLQLLTLQSWLLDAPCSLPAEAALCWRAPGGDPCQPLVPPLSWENVTVDVNSSEKLQLQECLWADSLGPLKDDVLLLETRGPQDNRSLCALEPSGCTSLPSKASTRAARLGEYLLQDLQSGQCLQLWDDDLGALWACPMDKYIHKRWALVWLACLLFAAALSLILLLKKDHAKAAARGRAALLLYSADDSGFERLVGALASALCQLPLRVAVDLWSRRELSAQGPVAWFHAQRRQTLQEGGVVVLLFSPGAVALCSEWLQDGVSGPGAHGPHDAFRASLSCVLPDFLQGRAPGSYVGACFDRLLHPDAVPALFRTVPVFTLPSQLPDFLGALQQPRAPRSGRLQERAEQVSRALQPALDSYFHPPGTPAPGRGVGPGAGPGAGDGT

SEQ ID NO: 48 - protein, 692 aa, Homo sapiens
MPVPWFLLSLALGRSPVVLSLERLVGPQDATHCSPGLSCRLWDSDILCLPGDIVPAPGPVLAPTHLQTELVLRCQKETDCDLCLRVAVHLAVHGHWEEPEDEEKFGGAADSGVEEPRNASLQAQVVLSFQAYPTARCVLLEVQVPAALVQFGQSVGSVVYDCFEAALGSEVRIWSYTQPRYEKELNHTQQLPALPWLNVSADGDNVHLVLNVSEEQHFGLSLYWNQVQGPPKPRWHKNLTGPQIITLNHTDLVPCLCIQVWPLEPDSVRTNICPFREDPRAHQNLWQAARLQLLTLQSWLLDAPCSLPAEAALCWRAPGGDPCQPLVPPLSWENVTVDKVLEFPLLKGHPNLCVQVNSSEKLQLQECLWADSLGPLKDDVLLLETRGPQDNRSLCALEPSGCTSLPSKASTRAARLGEYLLQDLQSGQCLQLWDDDLGALWACPMDKYIHKRWALVWLACLLFAAALSLILLLKKDHAKAAARGRAALLLYSADDSGFERLVGALASALCQLPLRVAVDLWSRRELSAQGPVAWFHAQRRQTLQEGGVVVLLFSPGAVALCSEWLQDGVSGPGAHGPHDAFRASLSCVLPDFLQGRAPGSYVGACFDRLLHPDAVPALFRTVPVFTLPSQLPDFLGALQQPRAPRSGRLQERAEQVSRALQPALDSYFHPPGTPAPGRGVGPGAGPGAGDGT

SEQ ID NO: 49 - protein, 390 aa, Homo sapiens
MRGDRGRGRGGRFGSRGGPGGGFRPFVPHIPFDFYLCEMAFPRVKPAPDETSFSEALLKRNQDLAPNSAEQASILSLVTKINNVIDNLIVAPGTFEVQIEEVRQVGSYKKGTMTTGHNVADLVVILKILPTLEAVAALGNKVVESLRAQDPSEVLTMLTNETGFEISSSDATVKILITTVPPNLRKLDPELHLDIKVLQSALAAIRHARWFEENASQSTVKVLIRLLKDLRIRFPGFEPLTPWILDLLGHYAVMNNPTRQPLALNVAYRRCLQILAAGLFLPGSVGITDPCESGNFRVHTVMTLEQQDMVCYTAQTLVRILSHGGFRKILGQEGDASYLASEISTWDGVIVTPSEKAYEKPPEKKEGEEEEENTEEPPQGEEEESMETQE

SEQ ID NO: 50 - protein, 191 aa, Homo sapiens
MAAYSYRPGPGAGPGPAAGAALPDQSFLWNVFQRVDKDRSGVISDTELQQALSNGTWTPFNPVTVRSIISMFDRENKAGVNFSEFTGVWKYITDWQNVFRTYDRDNSGMIDKNELKQALSGFGYRLSDQFHDILIRKFDRQGRGQIAFDDFIQGCIVLQRLTDIFRRYDTDQDGWIQVSYEQYLSMVFSIV

SEQ ID NO: 51 - protein, 189 aa, Homo sapiens
MAAYSYRPGPGAGPGPAAGAALPDQSFLWNVFQRVDKDRSGVISDTELQQALSNGTWTPFNPVTVRSIISMFDRENKAGVNFSEFTGVWKYITDWQNVFRTYDRDNSGMIDKNELKQALSGYRLSDQFHDILIRKFDRQGRGQIAFDDFIQGCIVLQRLTDIFRRYDTDQDGWIQVSYEQYLSMVFSIV

SEQ ID NO: 52 - protein, 69 aa, Homo sapiens
MAAYSYRPGPGAGPGPAAGAALPDQSFLWNVFQRVDKDRSGVISDTELQQALSNGTWTPFNPVTVRSII

SEQ ID NO: 53 - protein, 117 aa, Homo sapiens
MRASSFLIVVVFLIAGTLVLEAAVTGVPVKGQDTVKGRVPFNGQDPVKGQVSVKGQDKVKAQEPVKGPVSTKPGSCPIILIRCAMLNPPNRCLKDTDCPGIKKCCEGSCGMACFVPQ

SEQ ID NO: 54 - protein, 429 aa, Homo sapiens
MATLSFVFLLLGAVSWPPASASGQEFWPGQSAADILSGAASRRRYLLYDVNPPEGFNLRRDVYIRIASLLKTLLKTEEWVLVLPPWGRLYHWQSPDIHQVRIPWSEFFDLPSLNKNIPVIEYEQFIAESGGPFIDQVYVLQSYAEGWKEGTWEEKVDERPCIDQLLYSQDKHEYYRGWFWGYEETRGLNVSCLSVQGSASIVAPLLLRNTSARSVMLDRAENLLHDHYGGKEYWDTRRSMVFARHLREVGDEFRSRHLNSTDDADRIPFQEDWMKMKVKLGSALGGPYLGVHLRRKDFIWGHRQDVPSLEGAVRKIRSLMKTHRLDKVFVATDAVRKEYEELKKLLPEMVRFEPTWEELELYKDGGVAIIDQWICAHARFFIGTSVSTFSFRIHEEREILGLDPKTTYNRFCGDQEKACEQPTHWKITY

SEQ ID NO: 55 - protein, 424 aa, Homo sapiens
MATLSFVFLLLGAVSWPPASASGQEFWPGQSAADILSGAASRRRYLLYDVNPPEGFNLRRDVYIRIASLLKTLLKTEEWVLVLPPWGRLYHWQSPDIHQVRIPWSEFFDLPSLNKNIPVIEYEQFIAESGGPFIDQVYVLQSYAEGWKEGTWEEKVDERPCIDQLLYSQDKHEYYRGWFWGYEETRGLNVSCLSVQGSASIVAPLLLRNTSARSVMLDRAENLLHDHYGGKEYWDTRRSMVFARHLREVGDEFRSRHLNSTDDADRIPFQEDWMKMKVKLGSALGGPYLGVHLRRKDFIWGHRQDVPSLEGAVRKIRSLMKTHRLDKVFVATDAVRKEYEELKKLLPEMVRFEPTWEELELYKDGGVAIIDQWICAHARCLPTSLSAESGSGGFQRFFCPKYSVSEQMVACVHSGHFHTVCLLV

SEQ ID NO: 56 - protein, 380 aa, Homo sapiens
MATLSFVFLLLGAVSWPPASASGQEFWPGQSAADILSGAASRRRYLLYDVNPPEGFNLRRDVYIRIASLLKTLLKTEEWVLVLPPWGRLYHWQSPDIHQVRIPWSEFFDLPSLNKNIPVIEYEQFIAESGGPFIDQVYVLQSYAEGWKEGTWEEKVDERPCIDQLLYSQDKHEYYRGWFWGYEETRGLNVSCLSVQGSASIVAPLLLRNTSARSVMLDRAENLLHDHYGGKEYWDTRRSMVFARHLREVGDEFRSRHLNSTDDADRIPFQEDWMKMKVKLGSALGGPYLGVHLRRKDFIWGHRQDVPSLEGAVRKIRSLMKTHRLDKVFVATDAVRKEYEELKKLLPEMVRFEPTWEELELYKDGGVAIIDQWICAHASS

SEQ ID NO: 57 - protein, 491 aa, Homo sapiens
MSLKSERRGIHVDQSDLLCKKGCGYYGNPAWQGFCSKCWREEYHKARQKQIQEDWELAERLQREEEEAFASSQSSQGAQSLTFSKFEEKKTNEKTRKVTTVKKFFSASSRVGSKKEIQEAKAPSPSINRQTSIETDRVSKEFIEFLKTFHKTGQEIYKQTKLFLEGMHYKRDLSIEEQSECAQDFYHNVAERMQTRGKVPPERVEKIMDQIEKYIMTRLYKYVFCPETTDDEKKDLAIQKRIRALRWVTPQMLCVPVNEDIPEVSDMVVKAITDIIEMDSKRVPRDKLACITKCSKHIFNAIKITKNEPASADDFLPTLIYIVLKGNPPRLQSNIQYITRFCNPSRLMTGEDGYYFTNLCCAVAFIEKLDAQSLNLSQEDFDRYMSGQTSPRKQEAESWSPDACLGVKQMYKNLDLLSQLNERQERIMNEAKKLEKDLIDWTDGIAREVQDIVEKYPLEIKPPNQPLAAIDSENVENDKLPPPLQPQVYAG

SEQ ID NO: 58 - protein, 531 aa, Homo sapiens
MSLKSERRGIHVDQSDLLCKKGCGYYGNPAWQGFCSKCWREEYHKARQKQIQEDWELAERALLCYPGWSAMVQFQLTATSASWAQVILLLQPPKWLGLQKLQREEEEAFASSQSSQGAQSLTFSKFEEKKTNEKTRKVTTVKKFFSASSRVGSKKEIQEAKAPSPSINRQTSIETDRVSKEFIEFLKTFHKTGQEIYKQTKLFLEGMHYKRDLSIEEQSECAQDFYHNVAERMQTRGKVPPERVEKIMDQIEKYIMTRLYKYVFCPETTDDEKKDLAIQKRIRALRWVTPQMLCVPVNEDIPEVSDMVVKAITDIIEMDSKRVPRDKLACITKCSKHIFNAIKITKNEPASADDFLPTLIYIVLKGNPPRLQSNIQYITRFCNPSRLMTGEDGYYFTNLCCAVAFIEKLDAQSLNLSQEDFDRYMSGQTSPRKQEAESWSPDACLGVKQMYKNLDLLSQLNERQERIMNEAKKLEKDLIDWTDGIAREVQDIVEKYPLEIKPPNQPLAAIDSENVENDKLPPPLQPQVYAG

SEQ ID NO: 59 - protein, 505 aa, Homo sapiens
MMASSYHEVVSRKKMSLKSERRGIHVDQSDLLCKKGCGYYGNPAWQGFCSKCWREEYHKARQKQIQEDWELAERLQREEEEAFASSQSSQGAQSLTFSKFEEKKTNEKTRKVTTVKKFFSASSRVGSKKEIQEAKAPSPSINRQTSIETDRVSKEFIEFLKTFHKTGQEIYKQTKLFLEGMHYKRDLSIEEQSECAQDFYHNVAERMQTRGKVPPERVEKIMDQIEKYIMTRLYKYVFCPETTDDEKKDLAIQKRIRALRWVTPQMLCVPVNEDIPEVSDMVVKAITDIIEMDSKRVPRDKLACITKCSKHIFNAIKITKNEPASADDFLPTLIYIVLKGNPPRLQSNIQYITRFCNPSRLMTGEDGYYFTNLCCAVAFIEKLDAQSLNLSQEDFDRYMSGQTSPRKQEAESWSPDACLGVKQMYKNLDLLSQLNERQERIMNEAKKLEKDLIDWTDGIAREVQDIVEKYPLEIKPPNQPLAAIDSENVENDKLPPPLQPQVYAG

SEQ ID NO: 60 - protein, 364 aa, Homo sapiens
MVKLFIGNLPREATEQEIRSLFEQYGKVLECDIIKNYGFVHIEDKTAAEDAIRNLHHYKLHGVNINVEASKNKSKTSTKLHVGNISPTCTNKELRAKFEEYGPVIECDIVKDYAFVHMERAEDAVEAIRGLDNTEFQGKRMHVQLSTSRLRTAPGMGDQSGCYRCGKEGHWSKECPIDRSGRVADLTEQYNEQYGAVRTPYTMSYGDSLYYNNAYGALDAYYKRCRAARSYEAVAAAAASVYNYAEQTLSQLPQVQNTAMASHLTSTSLDPYDRHLLPTSGAAATAAAAAAAAAAVTAASTSYYGRDRSPLRRATAPVPTVGEGYGYGHESELSQASAAARNSLYDMARYEREQYADRARYSAF

SEQ ID NO: 61 - protein, 177 aa, Homo sapiens
MVKLFIGNLPREATEQEIRSLFEQYGKVLECDIIKNYGFVHIEDKTAAEDAIRNLHHYKLHGVNINVEASKNKSKTSTKLHVGNISPTCTNKELRAKFEEYGPVIECDIVKDYAFVHMERAEDAVEAIRGLDNTEFQGEPPSLGRGLNTRLCAENGWISKRRGLVKITAVGWLVMKK

SEQ ID NO: 62 - protein, 143 aa, Homo sapiens
MVKLFIGNLPREATEQEIRSLFEQYGKVLECDIIKNYGFVHIEDKTAAEDAIRNLHHYKLHGVNINVEASKNKSKTSTKLHVGNISPTCTNKELRAKFEEYGPVIECDIVKDYAFVHMERAEDAVEAIRGLDNTEFQGGMCVG

SEQ ID NO: 63 - protein, 173 aa, Homo sapiens
MVKLFIGNLPREATEQEIRSLFEQYGKVLECDIIKNYGFVHIEDKTAAEDAIRNLHHYKLHGVNINVEASKNKSKTSTKLHVGNISPTCTNKELRAKFEEYGPVIECDIVKDYAFVHMERAEDAVEAIRGLDNTEFQGKITPVTEGYCCCNKGHTYIFKNCNLILESRKSRRC

SEQ ID NO: 64 - protein, 121 aa, Homo sapiens
MEAEVDKLELMFQKAESDLDYIQYRLEYEIKTNHPDSASEKNPVTLLKELSVIKSRYQTLYARFKPVAVEQKESKSRICATVKKTMNMIQKLQKQTDLELSPLTKEEKTAAEQFKFHMPDL

SEQ ID NO: 65 - protein, 75 aa, Homo sapiens
MASEVGHNLESPETPGGGGWTRVEFPPPAPKGAATVWCLNRLGSRKLSLIWITFNTGWNMKSRLIILIQQVSCHH

SEQ ID NO: 66 - protein, 506 aa, Homo sapiens
MKKAEMGRFSISPDEDSSSYSSNSDFNYSYPTKQAALKSHYADVDPENQNFLLESNLGKKKYETEFHPGTTSFGMSVFNLSNAIVGSGILGLSYAMANTGIALFIILLTFVSIFSLYSVHLLLKTANEGGSLLYEQLGYKAFGLVGKLAASGSITMQNIGAMSSYLFIVKYELPLVIQALTNIEDKTGLWYLNGNYLVLLVSLVVILPLSLFRNLGYLGYTSGLSLLCMVFFLIVVICKKFQVPCPVEAALIINETINTTLTQPTALVPALSHNVTENDSCRPHYFIFNSQTVYAVPILIFSFVCHPAVLPIYEELKDRSRRRMMNVSKISFFAMFLMYLLAALFGYLTFYEHVESELLHTYSSILGTDILLLIVRLAVLMAVTLTVPVVIFPIRSSVTHLLCASKDFSWWRHSLITVSILAFTNLLVIFVPTIRDIFGFIGASAASMLIFILPSAFYIKLVKKEPMKSVQKIGALFFLLSGVLVMTGSMALIVLDWVHNAPGGGH

SEQ ID NO: 67 - protein, 406 aa, Homo sapiens
MKQNLILLTFVSIFSLYSVHLLLKTANEGGSLLYEQLGYKAFGLVGKLAASGSITMQNIGAMSSYLFIVKYELPLVIQALTNIEDKTGLWYLNGNYLVLLVSLVVILPLSLFRNLGYLGYTSGLSLLCMVFFLIVVICKKFQVPCPVEAALIINETINTTLTQPTALVPALSHNVTENDSCRPHYFIFNSQTVYAVPILIFSFVCHPAVLPIYEELKDRSRRRMMNVSKISFFAMFLMYLLAALFGYLTFYEHVESELLHTYSSILGTDILLLIVRLAVLMAVTLTVPVVIFPIRSSVTHLLCASKDFSWWRHSLITVSILAFTNLLVIFVPTIRDIFGFIGASAASMLIFILPSAFYIKLVKKEPMKSVQKIGALFFLLSGVLVMTGSMALIVLDWVHNAPGGGH

SEQ ID NO: 68 - protein, 255 aa, Homo sapiens
MVKLTAELIEQAAQYTNAVRDRELDLRGYKIPVIENLGATLDQFDAIDFSDNEIRKLDGFPLLRRLKTLLVNNNRICRIGEGLDQALPCLTELILTNNSLVELGDLDPLASLKSLTYLSILRNPVTNKKHYRLYVIYKVPQVRVLDFQKVKLKERQEAEKMFKGKRGAQLAKDIARRSKTFNPGAGLPTDKKKGGPSPGDVEAIKNAIANASTLAEVERLKGLLQSGQIPGRERRSGPTDDGEEEMEEDTVTNGS

SEQ ID NO: 69 - protein, 226 aa, Homo sapiens
MAAAAVQGGRSGGSGGCSGAGGASNCGTGSGRSGLLDKWKIDDKPVKIDKWDGSAVKNSLDDSAKKVLLEKYKYVENFGLIDGRLTICTISCFFAIVALIWDYMHPFPESKPVLALCVISYFVMMGILTIYTSYKEKSIFLVAHRKDPTGMDPDDIWQLSSSLKRFDDKYTLKLTFISGRTKQQREAEFTKSIAKFFDHSGTLVMDAYEPEISRLHDSLAIERKIK

SEQ ID NO: 70 - protein, 278 aa, Homo sapiens
MDKSGIDSLDHVTSDAVELANRSDNSSDSSLFKTQCIPYSPKGEKRNPIRKFVRTPESVHASDSSSDSSFEPIPLTIKAIFERFKNRKKRYKKKKKRRYQPTGRPRGRPEGRRNPIYSLIDKKKQFRSRGSGFPFLESENEKNAPWRKILTFEQAVARGFFNYIEKLKYEHHLKESLKQMNVGEDLENEDFDSRRYKFLDDDGSISPIEESTAEDEDATHLEDNECDIKLAGDSFIVSSEFPVRLSVYLEEEDITEEAALSKKRATKAKNTGQRGLKM

SEQ ID NO: 71 - protein, 281 aa, Homo sapiens [sequence omitted]

SEQ ID NO: 72 - protein, 101 aa, Homo sapiens
MAMMEVQGGPSLGQTCVLIVIFTVLLQSLCVAVTYVYFTNELKQMQDKYSKSGIACFLKEDDSYWDPNDEESMNSPCWQVKWQLRQLVRKTPRMKRLWAAK

SEQ ID NO: 73 - protein, 478 aa, Homo sapiens
MSQVTFSDVAIDFSHEEWACLDSAQRDLYKDVMVQNYENLVSVGLSVTKPYVIMLLEDGKEPWMMEKKLSKAYPFPLSHSVPASVNFGFSALFEHCSEVTEIFELSELCVFWVLHFLSNSPNSTVEAFSRSKKKKKKKKKRQCFAFLIYFRLGIKMGKQGIINKEGYLYEDSPQPVTMEKVVKQSYEFSNSNKNLEYTECDTFRSTFHSKSTLSEPQNNSAEGNSHKYDILKKNLSKKSVIKSERINGGKKLLNSNKSGAAFNQSKSLTLPQTCNREKIYTCSECGKAFGKQSILSRHWRIHTGEKPYECRECGKTFSHGSSLTRHQISHSGEKPYKCIECGKAFSHGSSLTNHQSTHTGEKPYECMNCGKSFSRVSLLIQHLRIHTQEKRYECRICGKAFIHSSSLIHHQKSHTGEKPYECRECGKAFCCSSHLTQHQRIHSMKKKYECNKCLKVFSSFSFLVQHQSIHTEEKPFEV

SEQ ID NO: 74 - protein, 399 aa, Homo sapiens
MSQVTFSDVAIDFSHEEWACLDSAQRDLYKDVMVQNYENLVSVGLSVTKPYVIMLLEDGKEPWMMEKKLSKDWESRWENKELSTKKDIYDEDSPQPVTMEKVVKQSYEFSNSNKNLEYTECDTFRSTFHSKSTLSEPQNNSAEGNSHKYDILKKNLSKKSVIKSERINGGKKLLNSNKSGAAFNQSKSLTLPQTCNREKIYTCSECGKAFGKQSILSRHWRIHTGEKPYECRECGKTFSHGSSLTRHQISHSGEKPYKCIECGKAFSHGSSLTNHQSTHTGEKPYECMNCGKSFSRVSLLIQHLRIHTQEKRYECRICGKAFIHSSSLIHHQKSHTGEKPYECRECGKAFCCSSHLTQHQRIHSMKKKYECNKCLKVFSSFSFLVQHQSIHTEEKPFEV

SEQ ID NO: 75 - protein, 665 aa, Homo sapiens
MESVTFEDVAVEFIQEWALLDSARRSLCKYRMLDQCRTLASRGTPPCKPSCVSQLGQRAEPKATERGILRATGVAWESQLKPEELPSMQDLLEEASSRDMQMGPGLFLRMQLVPSIEERETPLTREDRPALQEPPWSLGCTGLKAAMQIQRVVIPVPTLGHRNPWVARDSAVPARDPAWLQEDKVEEEAMAPGLPTACSQEPVTFADVAVVFTPEEWVFLDSTQRSLYRDVMLENYRNLASVADQLCKPNALSYLEERGEQWTTDRGVLSDTCAEPQCQPQEAIPSQDTFTEILSIDVKGEQPQPGEKLYKYNELEKPFNSIEPLFQYQRIHAGEASCECQEIRNSFFQSAHLIVPEKIRSGDKSYACNKCEKSFRYSSDLIRHEKTHTAEKCFDCQECGQAFKYSSNLRRHMRTHTGEKPFECSQCGKTFTRNFNLILHQRNHTGEKPYECKDCGKAFNQPSSLRSHVRTHTGEKPFECSQCGKAFREHSSLKTHLRTHTREKPYECNQCGKPFRTSTHLNVHKRIHTGEKLYECATCGQVLSRLSTLKSHMRTHTGEKPYVCQECGRAFSEPSSLRKHARTHSGKKPYACQECGRAFGQSSHLIVHVRTHSAGRPYQCNQCEKAFRHSSSLTVHKRTHVGRETIRNGSLPLSMSHPYCGPLAN

SEQ ID NO: 76 - protein, 182 aa, Homo sapiens
MESVTFEDVAVEFIQEWALLDSARRSLCKYRMLDQCRTLASRGTPPCKPSCVSQLGQRAEPKATERGILRATGVAWESQLKPEELPSMQDLLEEASSRDMQMGPGLFLRMQLVPSIEERETPLTREDRPALQEPPWSLGCTLPLLSLLLPSCPEPPLVLLDSSSAPDRHLGSTLDTEARGIP

SEQ ID NO: 77 - protein, 303 aa, Homo sapiens
MESVTFEDVAVEFIQEWALLDSARRSLCKYRMLDQCRTLASRGTPPCKPSCVSQLGQRAEPKATERGILRATGVAWESQLKPEELPSMQDLLEEASSRDMQMGPGLFLRMQLVPSIEERETPLTREDRPALQEPPWSLGCTGLKAAMQIQRVVIPVPTLGHRNPWVARDSAVPARDPAWLQEDKVEEEAMAPGLPTACSQEPVTFADVAVVFTPEEWVFLDSTQRSLYRDVMLENYRNLASVADQLCKPNALSYLEERGEQWTTDRGVLSDTCAEPQCQPQEAIPSQDTFTEILSIDVKGPPN

SEQ ID NO: 78 - protein, 510 aa, Homo sapiens
MAAAALRDPAQVPVAADLLTDHEEGYVTFEDVAVYFSQEEWRLLDDAQRLLYRNVMLENFTLLASLGLASSKTHEITQLESWEEPFMPAWEVVTSAIPRGCWHGAEAEEAPEQIASVGLLSSNIQQHQKQHCGEKPLKRQEGRVPVLRSCKVHLSEKSLQSREVGKALLISSGVLKHQVTHTGEKSHRSSKSREAFHAGKRHYKCSECGKAFGQKYLLVQHQRLHAGKKTYECSECGKLFRDMSNLFIHQIVHTGERPYGCSNCGKSFSRNAHLIEHQRVHTGEKPFTCSECGKAFRHNSTLVQHHKIHTGVRPYECSECGKLFSFNSSLMKHQRIHTGERPYKCSECGKFYSHKSNLIKHWRVHTGERPYKCSDCGKFFTQCSSLMQHQKVHTGEKPFKCNECGRFFRENSTLVRHQRVHTGAKPYECRECGKFFSQSSTLMQHRKVHIGEKPFKCNECGRLFRENSSLVKHQRVHTGAKPYECRECGKFFRHNSSLFKHRRIHTGEMQ

SEQ ID NO: 79 - protein, 478 aa, Homo sapiens
MAAAALRDPAQVPVAADLLTDHEEQGYVTFEDVAVYFSQEEWRLLDDAQRLLYRNVMLENFTLLASLGCWHGAEAEEAPEQIASVGLLSSNIQQHQKQHCGEKPLKRQEGRVPVLRSCKVHLSEKSLQSREVGKALLISSGVLKHQVTHTGEKSHRSSKSREAFHAGKRHYKCSECGKAFGQKYLLVQHQRLHAGKKTYECSECGKLFRDMSNLFIHQIVHTGERPYGCSNCGKSFSRNAHLIEHQRVHTGEKPFTCSECGKAFRHNSTLVQHHKIHTGVRPYECSECGKLFSFNSSLMKHQRIHTGERPYKCSECGKFYSHKSNLIKHWRVHTGERPYKCSDCGKFFTQCSSLMQHQKVHTGEKPFKCNECGRFFRENSTLVRHQRVHTGAKPYECRECGKFFSQSSTLMQHRKVHIGEKPFKCNECGRLFRENSSLVKHQRVHTGAKPYECRECGKFFRHNSSLFKHRRIHTGEMQ

SEQ ID NO: 80 - protein, 497 aa, Homo sapiens
MAAAALRDPAQGYVTFEDVAVYFSQEEWRLLDDAQRLLYRNVMLENFTLLASLGLASSKTHEITQLESWEEPFMPAWEVVTSAIPRGCWHGAEAEEAPEQIASVGLLSSNIQQHQKQHCGEKPLKRQEGRVPVLRSCKVHLSEKSLQSREVGKALLISSGVLKHQVTHTGEKSHRSSKSREAFHAGKRHYKCSECGKAFGQKYLLVQHQRLHAGKKTYECSECGKLFRDMSNLFIHQIVHTGERPYGCSNCGKSFSRNAHLIEHQRVHTGEKPFTCSECGKAFRHNSTLVQHHKIHTGVRPYECSECGKLFSFNSSLMKHQRIHTGERPYKCSECGKFYSHKSNLIKHWRVHTGERPYKCSDCGKFFTQCSSLMQHQKVHTGEKPFKCNECGRFFRENSTLVRHQRVHTGAKPYECRECGKFFSQSSTLMQHRKVHIGEKPFKCNECGRLFRENSSLVKHQRVHTGAKPYECRECGKFFRHNSSLFKHRRIHTGEMQ

SEQ ID NO: 81 - protein, 498 aa, Homo sapiens
MAAAALRDPAQQGYVTFEDVAVYFSQEEWRLLDDAQRLLYRNVMLENFTLLASLGLASSKTHEITQLESWEEPFMPAWEVVTSAIPRGCWHGAEAEEAPEQIASVGLLSSNIQQHQKQHCGEKPLKRQEGRVPVLRSCKVHLSEKSLQSREVGKALLISSGVLKHQVTHTGEKSHRSSKSREAFHAGKRHYKCSECGKAFGQKYLLVQHQRLHAGKKTYECSECGKLFRDMSNLFIHQIVHTGERPYGCSNCGKSFSRNAHLIEHQRVHTGEKPFTCSECGKAFRHNSTLVQHHKIHTGVRPYECSECGKLFSFNSSLMKHQRIHTGERPYKCSECGKFYSHKSNLIKHWRVHTGERPYKCSDCGKFFTQCSSLMQHQKVHTGEKPFKCNECGRFFRENSTLVRHQRVHTGAKPYECRECGKFFSQSSTLMQHRKVHIGEKPFKCNECGRLFRENSSLVKHQRVHTGAKPYECRECGKFFRHNSSLFKHRRIHTGEMQ

SEQ ID NO: 82 - protein, 511 aa, Homo sapiens
MAAAALRDPAQVPVAADLLTDHEEQGYVTFEDVAVYFSQEEWRLLDDAQRLLYRNVMLENFTLLASLGLASSKTHEITQLESWEEPFMPAWEVVTSAIPRGCWHGAEAEEAPEQIASVGLLSSNIQQHQKQHCGEKPLKRQEGRVPVLRSCKVHLSEKSLQSREVGKALLISSGVLKHQVTHTGEKSHRSSKSREAFHAGKRHYKCSECGKAFGQKYLLVQHQRLHAGKKTYECSECGKLFRDMSNLFIHQIVHTGERPYGCSNCGKSFSRNAHLIEHQRVHTGEKPFTCSECGKAFRHNSTLVQHHKIHTGVRPYECSECGKLFSFNSSLMKHQRIHTGERPYKCSECGKFYSHKSNLIKHWRVHTGERPYKCSDCGKFFTQCSSLMQHQKVHTGEKPFKCNECGRFFRENSTLVRHQRVHTGAKPYECRECGKFFSQSSTLMQHRKVHIGEKPFKCNECGRLFRENSSLVKHQRVHTGAKPYECRECGKFFRHNSSLFKHRRIHTGEMQ

SEQ ID NO: 83 - protein, 464 aa, Homo sapiens
MAAAALRDPAQGYVTFEDVAVYFSQEEWRLLDDAQRLLYRNVMLENFTLLASLGCWHGAEAEEAPEQIASVGLLSSNIQQHQKQHCGEKPLKRQEGRVPVLRSCKVHLSEKSLQSREVGKALLISSGVLKHQVTHTGEKSHRSSKSREAFHAGKRHYKCSECGKAFGQKYLLVQHQRLHAGKKTYECSECGKLFRDMSNLFIHQIVHTGERPYGCSNCGKSFSRNAHLIEHQRVHTGEKPFTCSECGKAFRHNSTLVQHHKIHTGVRPYECSECGKLFSFNSSLMKHQRIHTGERPYKCSECGKFYSHKSNLIKHWRVHTGERPYKCSDCGKFFTQCSSLMQHQKVHTGEKPFKCNECGRFFRENSTLVRHQRVHTGAKPYECRECGKFFSQSSTLMQHRKVHIGEKPFKCNECGRLFRENSSLVKHQRVHTGAKPYECRECGKFFRHNSSLFKHRRIHTGEMQ

SEQ ID NO: 84 - protein, 865 aa, Homo sapiens
MSLQDSTLSREGKPEGEIMAAVFFSVGRLSPEVTQPDEDLHLQAEETQLVKESVTFKDVAIDFTLEEWRLMDPTQRNLHKDVMLENYRNLVSLGLAVSKPDMISHLENGKGPWVTVREISRIPYPDMEPKPATKKATRTKAISEDLSQEAILEKLTENGLWDSRMEGLWKWNDRILRLQNNQENHLSQRIIPLKKTPTSQRGFRFESILIPEPGIATEELHSRCQTQEENFTENLNLITDTHLGKIICKEMKGSKAIRQTSELTLGKKSNNKEKPYKCSTCEKAFHYRSLLIQHQRTHTKEKPYECNECGKTFSQPSYLSQHKKIHTGEKPYKCNECGKAFIASSSLMVHQRIHTKEKPYQCNVCGKSFSQCARLNQHQRIQTGEKPYKCSECGKAFSDKSKLARHQETHNGEKPYKCDDCGKAFRNKSYLSVHQKTHTEEKPYQCNECGKSFKNTTIFNVHQRIHTGEKPFRCNECGKAYRSNSSLIVHIRTHTGEKPYECNECGKAFNRIANFTEHQRIHTGEKPYKCNECGKAFINYSCLTVHHRMHTGEKPYKCTECGKAFMRSSSLIIHQRIHTEEKPYLCNECGESFRIKSHLTVHQRIHTGEKPYKCTDCERAFTKMVNLKEHQKIHTGVKPYKCYDCGKSFRTKSYLIVHQRTHTGEKPYKCNECEKAFTNTSQLTVHQRRHTGEKPYKCNECGKVFTSNSGFNTHQRTHTGEKPFKCNDCGKAFSQMVHVTEHQKIHSGEKPYKCDVCGKAFRRGSYLTVHWRTHTGEKPYTCKECGKGCITLSQLTLHQRIHTGERPYKCEECGKAFRTNSDFTVHLRMHTGEKPYKCNECGKAFRSSSSLTVHQRIHQRETQLI

SEQ ID NO: 85 - protein, 739 aa, Homo sapiens
MEPKPATKKATRTKAISEDLSQEAILEKLTENGLWDSRMEGLWKWNDRILRLQNNQENHLSQRIIPLKKTPTSQRGFRFESILIPEPGIATEELHSRCQTQEENFTENLNLITDTHLGKIICKEMKGSKAIRQTSELTLGKKSNNKEKPYKCSTCEKAFHYRSLLIQHQRTHTKEKPYECNECGKTFSQPSYLSQHKKIHTGEKPYKCNECGKAFIASSSLMVHQRIHTKEKPYQCNVCGKSFSQCARLNQHQRIQTGEKPYKCSECGKAFSDKSKLARHQETHNGEKPYKCDDCGKAFRNKSYLSVHQKTHTEEKPYQCNECGKSFKNTTIFNVHQRIHTGEKPFRCNECGKAYRSNSSLIVHIRTHTGEKPYECNECGKAFNRIANFTEHQRIHTGEKPYKCNECGKAFINYSCLTVHHRMHTGEKPYKCTECGKAFMRSSSLIIHQRIHTEEKPYLCNECGESFRIKSHLTVHQRIHTGEKPYKCTDCERAFTKMVNLKEHQKIHTGVKPYKCYDCGKSFRTKSYLIVHQRTHTGEKPYKCNECEKAFTNTSQLTVHQRRHTGEKPYKCNECGKVFTSNSGFNTHQRTHTGEKPFKCNDCGKAFSQMVHVTEHQKIHSGEKPYKCDVCGKAFRRGSYLTVHWRTHTGEKPYTCKECGKGCITLSQLTLHQRIHTGERPYKCEECGKAFRTNSDFTVHLRMHTGEKPYKCNECGKAFRSSSSLTVHQRIHQRETQLI

SEQ ID NO: 86 - protein, 584 aa, Homo sapiens
MALSQGLFTFKDVAIEFSQEEWECLDPAQRALYRDVMLENYRNLLSLDEDNIPPEDDISVGFTSKGLSPKENNKEELYHLVILERKESHGINNFDLKEVWENMPKFDSLWDYDVKNYKGMPLTCNKNLTHRKDQQHNKSSIHFSLKQSVSIRDSAHQYFIHDKPFIRNLLKLKNNIRYAGNKYVKCFENKIGLSLQAQLAELQRFQTGEKMYECNPVEKSINSSSVSPLPPCVKNICNKYRKILKYPLLHTQYGRTHIREKSYKCNDCGKAFSKSSNLTNHQRIHSGQRPYKCNECGKAFNQCSNLTRHQRVHTGEKPYQCNICGKVCSQNSNLASHQRMHTGEKPYKCNECGKAFIQRSHLWGHERIHTGEKPYKCNECDKAFAERSSLTQHKRIHTGEKPYICNECGKAFKQCSHLTRHQNIHPGEKPHKCNVCGRAFIQSSSLVEHQRIHTGEKPYKCNKCDKAFIKRSHLWGHQRTHTGEKPYKCTECGKAFTERSNLTQHKKIHTGEKPYKCTECGKAFTQFANLTRHQKIHIEKKHCKHNIHGNALFQSSNLGDHQKSYNREKHIKYNETKIKYSSCT

SEQ ID NO: 87 - protein, 126 aa, Homo sapiens
MGLLTFRDVAIEFSREEWEHLDSDQKLLYGDVMLENYGNLVSLGLAVSKPDLITFLEQRKEPWNVKSAETVAIQPDIFSHDTQGLLRKKLIEASFQKVILDGYGSCGPQNLNLRKEWESEGKIILW

SEQ ID NO: 88 - protein, 178 aa, Homo sapiens
MVNVPDIFSHDTQGLLRKKLIEASFQKVILDGYGSCGPQNLNLRKEWESEGKCEGHNGYYDGHTKCKTTTYNKNLTVTGGQKHEKTQFMSVAFSKPCVSVSKCQHQFLKLTFSFKGNLDNPNSDLVHVSNNHLNQLKYRTGVNVQSNISEKERFKNEEVISKYDQFDGSLLKVCFTNK

SEQ ID NO: 89 - protein, 4548 aa, Homo sapiens
MEHKEVVLLLLLFLKSAAPEQSHVVQDCYHGDGQSYRGTYSTTVTGRTCQAWSSMTPHQHNRTTENYPNAGLIMNYCRNPDAVAAPYCYTRDPGVRWEYCNLTQCSDAEGTAVAPPTVTPVPSLEAPSEQAPTEQRPGVQECYHGNGQSYRGTYSTTVTGRTCQAWSSMTPHSHSRTPEYYPNAGLIMNYCRNPDAVAAPYCYTRDPGVRWEYCNLTQCSDAEGTAVAPPTVTPVPSLEAPSEQAPTEQRPGVQECYHGNGQSYRGTYSTTVTGRTCQAWSSMTPHSHSRTPEYYPNAGLIMNYCRNPDAVAAPYCYTRDPGVRWEYCNLTQCSDAEGTAVAPPTVTPVPSLEAPSEQAPTEQRPGVQECYHGNGQSYRGTYSTTVTGRTCQAWSSMTPHSHSRTPEYYPNAGLIMNYCRNPDAVAAPYCYTRDPGVRWEYCNLTQCSDAEGTAVAPPTVTPVPSLEAPSEQAPTEQRPGVQECYHGNGQSYRGTYSTTVTGRTCQAWSSMTPHSHSRTPEYYPNAGLIMNYCRNPDAVAAPYCYTRDPGVRWEYCNLTQCSDAEGTAVAPPTVTPVPSLEAPSEQAPTEQRPGVQECYHGNGQSYRGTYSTTVTGRTCQAWSSMTPHSHSRTPEYYPNAGLIMNYCRNPDAVAAPYCYTRDPGVRWEYCNLTQCSDAEGTAVAPPTVTPVPSLEAPSEQAPTEQRPGVQECYHGNGQSYRGTYSTTVTGRTCQAWSSMTPHSHSRTPEYYPNAGLIMNYCRNPDAVAAPYCYTRDPGVRWEYCNLTQCSDAEGTAVAPPTVTPVPSLEAPSEQAPTEQRPGVQECYHGNGQSYRGTYSTTVTGRTCQAWSSMTPHSHSRTPEYYPNAGLIMNYCRNPDAVAAPYCYTRDPGVRWEYCNLTQCSDAEGTAVAPPTVTPVPSLEAPSEQAPTEQRPGVQECYHGNGQSYRGTYSTTVTGRTCQAWSSMTPHSHSRTPEYYPNAGLIMNYCRNPDAVAAPYCYTRDPGVRWEYCNLTQCSDAEGTAVAPPTVTPVPSLEAPSEQAPTEQRPGVQECYHGNGQSYRGTYSTTVTGRTCQAWSSMTPHSHSRTPEYYPNAGLIMNYCRNPDAVAAPYCYTRDPGVRWEYCNLTQCSDAEGTAVAPPTVTPVPSLEAPSEQAPTEQRPGVQECYHGNGQSYRGTYSTTVTGRTCQAWSSMTPHSHSRTPEYYPNAGLIMNYCRNPDAVAAPYCYTRDPGVRWEYCNLTQCSDAEGTAVAPPTVTPVPSLEAPSEQAPTEQRPGVQECYHGNGQSYRGTYSTTVTGRTCQAWSSMTPHSHSRTPEYYPNAGLIMNYCRNPDAVAAPYCYTRDPGVRWEYCNLTQCSDAEGTAVAPPTVTPVPSLEAPSEQAPTEQRPGVQECYHGNGQSYRGTYSTTVTGRTCQAWSSMTPHSHSRTPEYYPNAGLIMNYCRNPDAVAAPYCYTRDPGVRWEYCNLTQCSDAEGTAVAPPTVTPVPSLEAPSEQAPTEQRPGVQECYHGNGQSYRGTYSTTVTGRTCQAWSSMTPHSHSRTPEYYPNAGLIMNYCRNPDAVAAPYCYTRDPGVRWEYCNLTQCSDAEGTAVAPPTVTPVPSLEAPSEQAPTEQRPGVQECYHGNGQSYRGTYSTTVTGRTCQAWSSMTPHSHSRTPEYYPNAGLIMNYCRNPDAVAAPYCYTRDPGVRWEYCNLTQCSDAEGTAVAPPTVTPVPSLEAPSEQAPTEQRPGVQECYHGNGQSYRGTYSTTVTGRTCQAWSSMTPHSHSRTPEYYPNAGLIMNYCRNPDAVAAPYCYTRDPGVRWEYCNLTQCSDAEGTAVAPPTVTPVPSLEAPSEQAPTEQRPGVQECYHGNGQSYRGTYSTTVTGRTCQAWSSMTPHSHSRTPEYYPNAGLIMNYCRNPDAVAAPYCYTRDPGVRWEYCNLTQCSDAEGTAVAPPTVTPVPSLEAPSEQAPTEQRPGVQECYHGNGQSYRGTYSTTVTGRTCQAWSSMTPHSHSRTPEYYPNAGLIMNYCRNPDAVAAPYCYTRDPGVRWEYCNLTQCSDAEGTAVAPPTVTPVPSLEAPSEQAPTEQRPGVQECYHGNGQSYRGTYSTTVTGRTCQAWSSMTPHSHSRTPEYYPNAGLIMNYCRNPDAVAAPYCYTRDPGVRWEYCNLTQCSDAEGTAVAPPTVTPVPSLEAPSEQAPTEQRPGVQECYHGNGQSYRGTYSTTVTGRTCQAWSSMTPHSHSRTPEYYPNAGLIMNYCRNPDAVAAPYCYTRDPGVRWEYCNLTQCSDAEGTAVAPPTVTPVPSLEAPSEQAPTEQRPGVQECYHGNGQSYRGTYSTTVTGRTCQAWSSMTPHSHSRTPEYYPNAGLIMNYCRNPDAVAAPYCYTRDPGVRWEYCNLTQCSDAEGTAVAPPTVTPVPSLEAPSEQAPTEQRPGVQECYHGNGQSYRGTYSTTVTGRTCQAWSSMTPHSHSRTPEYYPNAGLIMNYCRNPDAVAAPYCYTRDPGVRWEYCNLTQCSDAEGTAVAPPTVTPVPSLEAPSEQAPTEQRPGVQECYHGNGQSYRGTYSTTVTGRTCQAWSSMTPHSHSRTPEYYPNAGLIMNYCRNPDAVAAPYCYTRDPGVRWEYCNLTQCSDAEGTAVAPPTVTPVPSLEAPSEQAPTEQRPGVQECYHGNGQSYRGTYSTTVTGRTCQAWSSMTPHSHSRTPEYYPNAGLIMNYCRNPDAVAAPYCYTRDPGVRWEYCNLTQCSDAEGTAVAPPTVTPVPSLEAPSEQAPTEQRPGVQECYHGNGQSYRGTYSTTVTGRTCQAWSSMTPHSHSRTPEYYPNAGLIMNYCRNPDAVAAPYCYTRDPGVRWEYCNLTQCSDAEGTAVAPPTVTPVPSLEAPSEQAPTEQRPGVQECYHGNGQSYRGTYSTTVTGRTCQAWSSMTPHSHSRTPEYYPNAGLIMNYCRNPDAVAAPYCYTRDPGVRWEYCNLTQCSDAEGTAVAPPTVTPVPSLEAPSEQAPTEQRPGVQECYHGNGQSYRGTYSTTVTGRTCQAWSSMTPHSHSRTPEYYPNAGLIMNYCRNPDAVAAPYCYTRDPGVRWEYCNLTQCSDAEGTAVAPPTVTPVPSLEAPSEQAPTEQRPGVQECYHGNGQSYRGTYSTTVTGRTCQAWSSMTPHSHSRTPEYYPNAGLIMNYCRNPDAVAAPYCYTRDPGVRWEYCNLTQCSDAEGTAVAPPTVTPVPSLEAPSEQAPTEQRPGVQECYHGNGQSYRGTYSTTVTGRTCQAWSSMTPHSHSRTPEYYPNAGLIMNYCRNPDAVAAPYCYTRDPGVRWEYCNLTQCSDAEGTAVAPPTVTPVPSLEAPSEQAPTEQRPGVQECYHGNGQSYRGTYSTTVTGRTCQAWSSMTPHSHSRTPEYYPNAGLIMNYCRNPDPVAAPYCYTRDPSVRWEYCNLTQCSDAEGTAVAPPTITPIPSLEAPSEQAPTEQRPGVQECYHGNGQSYQGTYFITVTGRTCQAWSSMTPHSHSRTPAYYPNAGLIKNYCRNPDPVAAPWCYTTDPSVRWEYCNLTRCSDAEWTAFVPPNVILAPSLEAFFEQALTEETPGVQDCYYHYGQSYRGTYSTTVTGRTCQAWSSMTPHQHSRTPENYPNAGLTRNYCRNPDAEIRPWCYTMDPSVRWEYCNLTQCLVTESSVLATLTVVPDPSTEASSEEAPTEQSPGVQDCYHGDGQSYRGSFSTTVTGRTCQSWSSMTPHWHQRTTEYYPNGGLTRNYCRNPDAEISPWCYTMDPNVRWEYCNLTQCPVTESSVLATSTAVSEQAPTEQSPTVQDCYHGDGQSYRGSFSTTVTGRTCQSWSSMTPHWHQRTTEYYPNGGLTRNYCRNPDAEIRPWCYTMDPSVRWEYCNLTQCPVMESTLLTTPTVVPVPSTELPSEEAPTENSTGVQDCYRGDGQSYRGTLSTTITGRTCQSWSSMTPHWHRRIPLYYPNAGLTRNYCRNPDAEIRPWCYTMDPSVRWEYCNLTRCPVTESSVLTTPTVAPVPSTEAPSEQAPPEKSPVVQDCYHGDGRSYRGISSTTVTGRTCQSWSSMIPHWHQRTPENYPNAGLTENYCRNPDSGKQPWCYTTDPCVRWEYCNLTQCSETESGVLETPTVVPVPSMEAHSEAAPTEQTPVVRQCYHGNGQSYRGTFSTTVTGRTCQSWSSMTPHRHQRTPENYPNDGLTMNYCRNPDADTGPWCFTMDPSIRWEYCNLTRCSDTEGTVVAPPTVIQVPSLGPPSEQDCMFGNGKGYRGKKATTVTGTPCQEWAAQEPHRHSTFIPGTNKWAGLEKNYCRNPDGDINGPWCYTMNPRKLFDYCDIPLCASSSFDCGKPQVEPKKCPGSIVGGCVAHPHSWPWQVSLRTRFGKHFCGGTLISPEWVLTAAHCLKKSSRPSSYKVILGAHQEVNLESHVQEIEVSRLFLEPTQADIALLKLSRPAVITDKVMPACLPSPDYMVTARTECYITGWGETQGTFGTGLLKEAQLLVIENEVCNHYKYICAEHLARGTDSCQGDSGGPLVCFEKDKYILQGVTSWGLGCARPNKPGVYARVSRFVTWIEGMMRNN

SEQ ID NO: 90 - protein, 415 aa, Homo sapiens
MQMSYAIRCAFYQLLLAALMLVAMLQLLYLSLLSGLHGQEEQDQYFEFFPPSPRSVDQVKAQLRTALASGGVLDASGDYRVYRGLLKTTMDPNDVILATHASVDNLLHLSGLLERWEGPLSVSVFAATKEEAQLATVLAYALSSHCPDMRARVAMHLVCPSRYEAAVPDPREPGEFALLRSCQEVFDKLARVAQPGINYALGTNVSYPNNLLRNLAREGANYALVIDVDMVPSEGLWRGLREMLDQSNQWGGTALVVPAFEIRRARRMPMNKNELVQLYQVGEVRPFYYGLCTPCQAPTNYSRWVNLPEESLLRPAYVVPWQDPWEPFYVAGGKVPTFDERFRQYGFNRISQACELHVAGFDFEVLNEGFLVHKGFKEALKFHPQKEAENQHNKILYRQFKQELKAKYPNSPRRC

SEQ ID NO: 91 - protein, 790 aa, Homo sapiens
MRTYRYFLLLFWVGQPYPTLSTPLSKRTSGFPAKKRALELSGNSKNELNRSKRSWMWNQFFLLEEYTGSDYQYVGKLHSDQDRGDGSLKYILSGDGAGDLFIINENTGDIQATKRLDREEKPVYILRAQAINRRTGRPVEPESEFIIKIHDINDNEPIFTKEVYTATVPEMSDVGTFVVQVTATDADDPTYGNSAKVVYSILQGQPYFSVESETGIIKTALLNMDRENREQYQVVIQAKDMGGQMGGLSGTTTVNITLTDVNDNPPRFPQSTYQFKTPESSPPGTPIGRIKASDADVGENAEIEYSITDGEGLDMFDVITDQETQEGIITVKKLLDFEKKKVYTLKVEASNPYVEPRFLYLGPFKDSATVRIVVEDVDEPPVFSKLAYILQIREDAQINTTIGSVTAQDPDAARNPVKYSVDRHTDMDRIFNIDSGNGSIFTSKLLDRETLLWHNITVIATEINNPKQSSRVPLYIKVLDVNDNAPEFAEFYETFVCEKAKADQLIQTLHAVDKDDPYSGHQFSFSLAPEAASGSNFTIQDNKDNTAGILTRKNGYNRHEMSTYLLPVVISDNDYPVQSSTGTVTVRVCACDHHGNMQSCHAEALIHPTGLSTGALVAILLCIVILLVTVVLFAALRRQRKKEPLIISKEDIRDNIVSYNDEGGGEEDTQAFDIGTLRNPEAIEDNKLRRDIVPEALFLPRRTPTARDNTDVRDFINQRLKENDTDPTAPPYDSLATYAYEGTGSVADSLSSLESVTTDADQDYDYLSDWGPRFKKLADMYGGVDSDKDS

SEQ ID NO: 92 - protein, 663 aa, Homo sapiens
MRTYRYFLLLFWVGQPYPTLSTPLSKRTSGFPAKKRALELSGNSKNELNRSKRSWMWNQFFLLEEYTGSDYQYVGKLHSDQDRGDGSLKYILSGDGAGDLFIINENTGDIQATKRLDREEKPVYILRAQAINRRTGRPVEPESEFIIKIHDINDNEPIFTKEVYTATVPEMSDVGTFVVQVTATDADDPTYGNSAKVVYSILQGQPYFSVESETGIIKTALLNMDRENREQYQVVIQAKDMGGQMGGLSGTTTVNITLTDVNDNPPRFPQSTYQFKTPESSPPGTPIGRIKASDADVGENAEIEYSITDGEGLDMFDVITDQETQEGIITVKKLLDFEKKKVYTLKVEASNPYVEPRFLYLGPFKDSATVRIVVEDVDEPPVFSKLAYILQIREDAQINTTIGSVTAQDPDAARNPVKYSVDRHTDMDRIFNIDSGNGSIFTSKLLDRETLLWHNITVIATEINNPKQSSRVPLYIKVLDVNDNAPEFAEFYETFVCEKAKADQLIQTLHAVDKDDPYSGHQFSFSLAPEAASGSNFTIQDNKDNTAGILTRKNGYNRHEMSTYLLPVVISDNDYPVQSSTGTVTVRVCACDHHGNMQSCHAEALIHPTGLSTGALVAILLCIVILLGKLVLPASYLPMVRGSHCYCDTLDLSASPIKAYSLI

SEQ ID NO: 93 - protein, 179 aa, Homo sapiens
MSGGRAPAVLLGGVASLLLSFVWMPALLPVASRLLLLPRVLLTMASGSPPTQPSPASDSGSGYVPGSVSAAFVTCPNEKVAKEIARAVVEKRLAACVNLIPQITSIYEWKGKIEEDSEVLMMIKTQSSLVPALTDFVRSVHPYEVAEVIALPVEQGNFPYLQWVRQVTESVSDSITVLP

SEQ ID NO: 94 - protein, 198 aa, Homo sapiens
MIGSGLAGSGGAGGPSSTVTWCALFSNHVAATQASLLLSFVWMPALLPVASRLLLLPRVLLTMASGSPPTQPSPASDSGSGYVPGSVSAAFVTCPNEKVAKEIARAVVEKRLAACVNLIPQITSIYEWKGKIEEDSEVLMMIKTQSSLVPALTDFVRSVHPYEVAEVIALPVEQGNFPYLQWVRQVTESVSDSITVLP

SEQ ID NO: 95 - protein, 156 aa, Homo sapiens
MPALLPVASRLLLLPRVLLTMASGSPPTQPSPASDSGSGYVPGSVSAAFVTCPNEKVAKEIARAVVEKRLAACVNLIPQITSIYEWKGKIEEDSEVLMMIKTQSSLVPALTDFVRSVHPYEVAEVIALPVEQGNFPYLQWVRQVTESVSDSITVLP

SEQ ID NO: 96 - protein, 2413 aa, Homo sapiens
MGISTVILEMCLLWGQVLSTGGWIPRTTDYASLIPSEVPLDPTVAEGSPFPSESTLESTVAEGSPISLESTLESTVAEGSLIPSESTLESTVAEGSDSGLALRLVNGDGRCQGRVEILYRGSWGTVCDDSWDTNDANVVCRQLGCGWAMSAPGNAWFGQGSGPIALDDVRCSGHESYLWSCPHNGWLSHNCGHGEDAGVICSAAQPQSTLRPESWPVRISPPVPTEGSESSLALRLVNGGDRCRGRVEVLYRGSWGTVCDDYWDTNDANVVCRQLGCGWAMSAPGNAQFGQGSGPIVLDDVRCSGHESYLWSCPHNGWLTHNCGHSEDAGVICSAPQSRPTPSPDTWPTSHASTAGPESSLALRLVNGGDRCQGRVEVLYRGSWGTVCDDSWDTSDANVVCRQLGCGWATSAPGNARFGQGSGPIVLDDVRCSGYESYLWSCPHNGWLSHNCQHSEDAGVICSAAHSWSTPSPDTLPTITLPASTVGSESSLALRLVNGGDRCQGRVEVLYRGSWGTVCDDSWDTNDANVVCRQLGCGWAMLAPGNARFGQGSGPIVLDDVRCSGNESYLWSCPHNGWLSHNCGHSEDAGVICSGPESSLALRLVNGGDRCQGRVEVLYRGSWGTVCDDSWDTNDANVVCRQLGCGWATSAPGNARFGQGSGPIVLDDVRCSGHESYLWSCPNNGWLSHNCGHHEDAGVICSAAQSRSTPRPDTLSTITLPPSTVGSESSLTLRLVNGSDRCQGRVEVLYRGSWGTVCDDSWDTNDANVVCRQLGCGWATSAPGNARFGQGSGPIVLDDVRCSGHESYLWSCPHNGWLSHNCGHHEDAGVICSVSQSRPTPSPDTWPTSHASTAGPESSLALRLVNGGDRCQGRVEVLYRGSWGTVCDDSWDTSDANVVCRQLGCGWATSAPGNARFGQGSGPIVLDDVRCSGYESYLWSCPHNGWLSHNCQHSEDAGVICSAAHSWSTPSPDTLPTITLPASTVGSESSLALRLVNGGDRCQGRVEVLYQGSWGTVCDDSWDTNDANVVCRQLGCGWAMSAPGNARFGQGSGPIVLDDVRCSGHESYLWSCPHNGWLSHNCGHSEDAGVICSASQSRPTPSPDTWPTSHASTAGSESSLALRLVNGGDRCQGRVEVLYRGSWGTVCDDYWDTNDANVVCRQLGCGWAMSAPGNARFGQGSGPIVLDDVRCSGHESYLWSCPHNGWLSHNCGHHEDAGVICSASQSQPTPSPDTWPTSHASTAGSESSLALRLVNGGDRCQGRVEVLYRGSWGTVCDDYWDTNDANVVCRQLGCGWATSAPGNARFGQGSGPIVLDDVRCSGHESYLWSCPHNGWLSHNCGHHEDAGVICSASQSQPTPSPDTWPTSHASTAGSESSLALRLVNGGDRCQGRVEVLYRGSWGTVCDDYWDTNDANVVCRQLGCGWATSAPGNARFGQGSGPIVLDDVRCSGHESYLWSCPHNGWLSHNCGHHEDAGVICSASQSQPTPSPDTWPTSRASTAGSESTLALRLVNGGDRCRGRVEVLYQGSWGTVCDDYWDTNDANVVCRQLGCGWAMSAPGNAQFGQGSGPIVLDDVRCSGHESYLWSCPHNGWLSHNCGHHEDAGVICSAAQSQSTPRPDTWLTTNLPALTVGSESSLALRLVNGGDRCRGRVEVLYRGSWGTVCDDSWDTNDANVVCRQLGCGWAMSAPGNARFGQGSGPIVLDDVRCSGNESYLWSCPHKGWLTHNCGHHEDAGVICSATQINSTTTDWWHPTTTTTARPSSNCGGFLFYASGTFSSPSYPAYYPNNAKCVWEIEVNSGYRINLGFSNLKLEAHHNCSFDYVEIFDGSLNSSLLLGKICNDTRQIFTSSYNRMTIHFRSDISFQNTGFLAWYNSFPSDATLRLVNLNSSYGLCAGRVEIYHGGTWGTVCDDSWTIQEAEVVCRQLGCGRAVSALGNAYFGSGSGPITLDDVECSGTESTLWQCRNRGWFSHNCNHREDAGVICSGNHLSTPAPFLNITRPNTDYSCGGFLSQPSGDFSSPFYPGNYPNNAKCVWDIEVQNNYRVTVIFRDVQLEGGCNYDYIEVFDGPYRSSPLIARVCDGARGSFTSSSNFMSIRFISDHSITRRGFRAEYYSSPSNDSTNLLCLPNHMQASVSRSYLQSLGFSASDLVISTWNGYYECRPQITPNLVIFTIPYSGCGTFKQADNDTIDYSNFLTAAVSGGIIKRRTDLRIHVSCRMLQNTWVDTMYIANDTIHVANNTIQVEEVQYGNFDVNISFYTSSSFLYPVTSRPYYVDLNQDLYVQAEILHSDAVLTLFVDTCVASPYSNDFTSLTYDLIRSGCVRDDTYGPYSSPSLRIARFRFRAFHFLNRFPSVYLRCKMVVCRAYDPSSRCYRGCVLRSKRDVGSYQEKVDVVLGPIQLQTPPRREEEPR

SEQ ID NO: 97 - protein, 1785 aa, Homo sapiens
MGISTVILEMCLLWGQVLSTGGWIPRTTDYASLIPSEVPLDPTVAEGSPFPSESTLESTVAEGSPISLESTLESTVAEGSLIPSESTLESTVAEGSDSGLALRLVNGDGRCQGRVEILYRGSWGTVCDDSWDTNDANVVCRQLGCGWAMSAPGNAWFGQGSGPIALDDVRCSGHESYLWSCPHNGWLSHNCGHGEDAGVICSAAQPQSTLRPESWPVRISPPVPTEGSESSLALRLVNGGDRCRGRVEVLYRGSWGTVCDDYWDTNDANVVCRQLGCGWAMSAPGNAQFGQGSGPIVLDDVRCSGHESYLWSCPHNGWLTHNCGHSEDAGVICSAPQSRPTPSPDTWPTSHASTAGPESSLALRLVNGGDRCQGRVEVLYRGSWGTVCDDSWDTSDANVVCRQLGCGWATSAPGNARFGQGSGPIVLDDVRCSGYESYLWSCPHNGWLSHNCQHSEDAGVICSAAHSWSTPSPDTLPTITLPASTVGSESSLALRLVNGGDRCQGRVEVLYQGSWGTVCDDSWDTNDANVVCRQLGCGWAMSAPGNARFGQGSGPIVLDDVRCSGHESYLWSCPHNGWLSHNCGHSEDAGVICSASQSRPTPSPDTWPTSHASTAGSESSLALRLVNGGDRCQGRVEVLYRGSWGTVCDDYWDTNDANVVCRQLGCGWAMSAPGNARFGQGSGPIVLDDVRCSGHESYLWSCPHNGWLSHNCGHHEDAGVICSASQSQPTPSPDTWPTSHASTAGSESSLALRLVNGGDRCQGRVEVLYRGSWGTVCDDYWDTNDANVVCRQLGCGWATSAPGNARFGQGSGPIVLDDVRCSGHESYLWSCPHNGWLSHNCGHHEDAGVICSASQSQPTPSPDTWPTSRASTAGSESTLALRLVNGGDRCRGRVEVLYQGSWGTVCDDYWDTNDANVVCRQLGCGWAMSAPGNAQFGQGSGPIVLDDVRCSGHESYLWSCPHNGWLSHNCGHHEDAGVICSAAQSQSTPRPDTWLTTNLPALTVGSESSLALRLVNGGDRCRGRVEVLYRGSWGTVCDDSWDTNDANVVCRQLGCGWAMSAPGNARFGQGSGPIVLDDVRCSGNESYLWSCPHKGWLTHNCGHHEDAGVICSATQINSTTTDWWHPTTTTTARPSSNCGGFLFYASGTFSSPSYPAYYPNNAKCVWEIEVNSGYRINLGFSNLKLEAHHNCSFDYVEIFDGSLNSSLLLGKICNDTRQIFTSSYNRMTIHFRSDISFQNTGFLAWYNSFPSDATLRLVNLNSSYGLCAGRVEIYHGGTWGTVCDDSWTIQEAEVVCRQLGCGRAVSALGNAYFGSGSGPITLDDVECSGTESTLWQCRNRGWFSHNCNHREDAGVICSGNHLSTPAPFLNITRPNTDYSCGGFLSQPSGDFSSPFYPGNYPNNAKCVWDIEVQNNYRVTVIFRDVQLEGGCNYDYIEVFDGPYRSSPLIARVCDGARGSFTSSSNFMSIRFISDHSITRRGFRAEYYSSPSNDSTNLLCLPNHMQASVSRSYLQSLGFSASDLVISTWNGYYECRPQITPNLVIFTIPYSGCGTFKQADNDTIDYSNFLTAAVSGGIIKRRTDLRIHVSCRMLQNTWVDTMYIANDTIHVANNTIQVEEVQYGNFDVNISFYTSSSFLYPVTSRPYYVDLNQDLYVQAEILHSDAVLTLFVDTCVASPYSNDFTSLTYDLIRSGCVRDDTYGPYSSPSLRIARFRFRAFHFLNRFPSVYLRCKMVVCRAYDPSSRCYRGCVLRSKRDVGSYQEKVDVVLGPIQLQTPPRREEEPR

SEQ ID NO: 98 - protein, 2403 aa, Homo sapiens
MGISTVILEMCLLWGQVLSTGGWIPRTTDYASLIPSEVPLDPTVAEGSPFPSESTLESTVAEGSPISLESTLESTVAEGSLIPSESTLESTVAEGSDSGLALRLVNGDGRCQGRVEILYRGSWGTVCDDSWDTNDANVVCRQLGCGWAMSAPGNAWFGQGSGPIALDDVRCSGHESYLWSCPHNGWLSHNCGHGEDAGVICSAAQPQSTLRPESWPVRISPPVPTEGSESSLALRLVNGGDRCRGRVEVLYRGSWGTVCDDYWDTNDANVVCRQLGCGWAMSAPGNAQFGQGSGPIVLDDVRCSGHESYLWSCPHNGWLTHNCGHSEDAGVICSAPQSRPTPSPDTWPTSHASTAGPESSLALRLVNGGDRCQGRVEVLYRGSWGTVCDDSWDTSDANVVCRQLGCGWATSAPGNARFGQGSGPIVLDDVRCSGYESYLWSCPHNGWLSHNCQHSEDAGVICSDTLPTITLPASTVGSESSLALRLVNGGDRCQGRVEVLYRGSWGTVCDDSWDTNDANVVCRQLGCGWAMLAPGNARFGQGSGPIVLDDVRCSGNESYLWSCPHNGWLSHNCGHSEDAGVICSGPESSLALRLVNGGDRCQGRVEVLYRGSWGTVCDDSWDTNDANVVCRQLGCGWATSAPGNARFGQGSGPIVLDDVRCSGHESYLWSCPNNGWLSHNCGHHEDAGVICSAAQSRSTPRPDTLSTITLPPSTVGSESSLTLRLVNGSDRCQGRVEVLYRGSWGTVCDDSWDTNDANVVCRQLGCGWATSAPGNARFGQGSGPIVLDDVRCSGHESYLWSCPHNGWLSHNCGHHEDAGVICSVSQSRPTPSPDTWPTSHASTAGPESSLALRLVNGGDRCQGRVEVLYRGSWGTVCDDSWDTSDANVVCRQLGCGWATSAPGNARFGQGSGPIVLDDVRCSGYESYLWSCPHNGWLSHNCQHSEDAGVICSAAHSWSTPSPDTLPTITLPASTVGSESSLALRLVNGGDRCQGRVEVLYQGSWGTVCDDSWDTNDANVVCRQLGCGWAMSAPGNARFGQGSGPIVLDDVRCSGHESYLWSCPHNGWLSHNCGHSEDAGVICSASQSRPTPSPDTWPTSHASTAGSESSLALRLVNGGDRCQGRVEVLYRGSWGTVCDDYWDTNDANVVCRQLGCGWAMSAPGNARFGQGSGPIVLDDVRCSGHESYLWSCPHNGWLSHNCGHHEDAGVICSASQSQPTPSPDTWPTSHASTAGSESSLALRLVNGGDRCQGRVEVLYRGSWGTVCDDYWDTNDANVVCRQLGCGWATSAPGNARFGQGSGPIVLDDVRCSGHESYLWSCPHNGWLSHNCGHHEDAGVICSASQSQPTPSPDTWPTSHASTAGSESSLALRLVNGGDRCQGRVEVLYRGSWGTVCDDYWDTNDANVVCRQLGCGWATSAPGNARFGQGSGPIVLDDVRCSGHESYLWSCPHNGWLSHNCGHHEDAGVICSASQSQPTPSPDTWPTSRASTAGSESTLALRLVNGGDRCRGRVEVLYQGSWGTVCDDYWDTNDANVVCRQLGCGWAMSAPGNAQFGQGSGPIVLDDVRCSGHESYLWSCPHNGWLSHNCGHHEDAGVICSAAQSQSTPRPDTWLTTNLPALTVGSESSLALRLVNGGDRCRGRVEVLYRGSWGTVCDDSWDTNDANVVCRQLGCGWAMSAPGNARFGQGSGPIVLDDVRCSGNESYLWSCPHKGWLTHNCGHHEDAGVICSATQINSTTTDWWHPTTTTTARPSSNCGGFLFYASGTFSSPSYPAYYPNNAKCVWEIEVNSGYRINLGFSNLKLEAHHNCSFDYVEIFDGSLNSSLLLGKICNDTRQIFTSSYNRMTIHFRSDISFQNTGFLAWYNSFPSDATLRLVNLNSSYGLCAGRVEIYHGGTWGTVCDDSWTIQEAEVVCRQLGCGRAVSALGNAYFGSGSGPITLDDVECSGTESTLWQCRNRGWFSHNCNHREDAGVICSGNHLSTPAPFLNITRPNTDYSCGGFLSQPSGDFSSPFYPGNYPNNAKCVWDIEVQNNYRVTVIFRDVQLEGGCNYDYIEVFDGPYRSSPLIARVCDGARGSFTSSSNFMSIRFISDHSITRRGFRAEYYSSPSNDSTNLLCLPNHMQASVSRSYLQSLGFSASDLVISTWNGYYECRPQITPNLVIFTIPYSGCGTFKQADNDTIDYSNFLTAAVSGGIIKRRTDLRIHVSCRMLQNTWVDTMYIANDTIHVANNTIQVEEVQYGNFDVNISFYTSSSFLYPVTSRPYYVDLNQDLYVQAEILHSDAVLTLFVDTCVASPYSNDFTSLTYDLIRSGCVRDDTYGPYSSPSLRIARFRFRAFHFLNRFPSVYLRCKMVVCRAYDPSSRCYRGCVLRSKRDVGSYQEKVDVVLGPIQLQTPPRREEEPR

SEQ ID NO: 99 - protein, 1527 aa, Homo sapiens
MGISTVILEMCLLWGQVLSTGGWIPRTTDYASLIPSEVPLDPTVAEGSPFPSESTLESTVAEGSPISLESTLESTVAEGSLIPSESTLESTVAEGSDSGLALRLVNGDGRCQGRVEILYRGSWGTVCDDSWDTNDANVVCRQLGCGWAMSAPGNAWFGQGSGPIALDDVRCSGHESYLWSCPHNGWLSHNCGHGEDAGVICSAAQPQSTLRPESWPVRISPPVPTEGSESSLALRLVNGGDRCRGRVEVLYRGSWGTVCDDYWDTNDANVVCRQLGCGWAMSAPGNAQFGQGSGPIVLDDVRCSGHESYLWSCPHNGWLTHNCGHSEDAGVICSAPQSRPTPSPDTWPTSHASTAGPESSLALRLVNGGDRCQGRVEVLYRGSWGTVCDDSWDTSDANVVCRQLGCGWATSAPGNARFGQGSGPIVLDDVRCSGYESYLWSCPHNGWLSHNCQHSEDAGVICSAAHSWSTPSPDTLPTITLPASTVGSESSLALRLVNGGDRCQGRVEVLYRGSWGTVCDDSWDTNDANVVCRQLGCGWATSAPGNARFGQGSGPIVLDDVRCSGHESYLWSCPHNGWLSHNCGHHEDAGVICSASQSQPTPSPDTWPTSRASTAGSESTLALRLVNGGDRCRGRVEVLYQGSWGTVCDDYWDTNDANVVCRQLGCGWAMSAPGNAQFGQGSGPIVLDDVRCSGHESYLWSCPHNGWLSHNCGHHEDAGVICSAAQSQSTPRPDTWLTTNLPALTVGSESSLALRLVNGGDRCRGRVEVLYRGSWGTVCDDSWDTNDANVVCRQLGCGWAMSAPGNARFGQGSGPIVLDDVRCSGNESYLWSCPHKGWLTHNCGHHEDAGVICSATQINSTTTDWWHPTTTTTARPSSNCGGFLFYASGTFSSPSYPAYYPNNAKCVWEIEVNSGYRINLGFSNLKLEAHHNCSFDYVEIFDGSLNSSLLLGKICNDTRQIFTSSYNRMTIHFRSDISFQNTGFLAWYNSFPSDATLRLVNLNSSYGLCAGRVEIYHGGTWGTVCDDSWTIQEAEVVCRQLGCGRAVSALGNAYFGSGSGPITLDDVECSGTESTLWQCRNRGWFSHNCNHREDAGVICSGNHLSTPAPFLNITRPNTDYSCGGFLSQPSGDFSSPFYPGNYPNNAKCVWDIEVQNNYRVTVIFRDVQLEGGCNYDYIEVFDGPYRSSPLIARVCDGARGSFTSSSNFMSIRFISDHSITRRGFRAEYYSSPSNDSTNLLCLPNHMQASVSRSYLQSLGFSASDLVISTWNGYYECRPQITPNLVIFTIPYSGCGTFKQADNDTIDYSNFLTAAVSGGIIKRRTDLRIHVSCRMLQNTWVDTMYIANDTIHVANNTIQVEEVQYGNFDVNISFYTSSSFLYPVTSRPYYVDLNQDLYVQAEILHSDAVLTLFVDTCVASPYSNDFTSLTYDLIRSGCVRDDTYGPYSSPSLRIARFRFRAFHFLNRFPSVYLRCKMVVCRAYDPSSRCYRGCVLRSKRDVGSYQEKVDVVLGPIQLQTPPRREEEPR

SEQ ID NO: 100 - protein, 2542 aa, Homo sapiens
MGISTVILEMCLLWGQVLSTGGWIPRTTDYASLIPSEVPLDPTVAEGSPFPSESTLESTVAEGSPISLESTLESTVAEGSLIPSESTLESTVAEGSDSGLALRLVNGDGRCQGRVEILYRGSWGTVCDDSWDTNDANVVCRQLGCGWAMSAPGNAWFGQGSGPIALDDVRCSGHESYLWSCPHNGWLSHNCGHGEDAGVICSAAQPQSTLRPESWPVRISPPVPTEGSESSLALRLVNGGDRCRGRVEVLYRGSWGTVCDDYWDTNDANVVCRQLGCGWAMSAPGNAQFGQGSGPIVLDDVRCSGHESYLWSCPHNGWLTHNCGHSEDAGVICSAPQSRPTPSPDTWPTSHASTAGPESSLALRLVNGGDRCQGRVEVLYRGSWGTVCDDSWDTSDANVVCRQLGCGWATSAPGNARFGQGSGPIVLDDVRCSGYESYLWSCPHNGWLSHNCQHSEDAGVICSAAHSWSTPSPDTLPTITLPASTVGSESSLALRLVNGGDRCQGRVEVLYRGSWGTVCDDSWDTNDANVVCRQLGCGWAMLAPGNARFGQGSGPIVLDDVRCSGNESYLWSCPHNGWLSHNCGHSEDAGVICSGPESSLALRLVNGGDRCQGRVEVLYRGSWGTVCDDSWDTNDANVVCRQLGCGWATSAPGNARFGQGSGPIVLDDVRCSGHESYLWSCPNNGWLSHNCGHHEDAGVICSAAQSRSTPRPDTLSTITLPPSTVGSESSLTLRLVNGSDRCQGRVEVLYRGSWGTVCDDSWDTNDANVVCRQLGCGWATSAPGNARFGQGSGPIVLDDVRCSGHESYLWSCPHNGWLSHNCGHHEDAGVICSVSQSRPTPSPDTWPTSHASTAGPESSLALRLVNGGDRCQGRVEVLYRGSWGTVCDDSWDTSDANVVCRQLGCGWATSAPGNARFGQGSGPIVLDDVRCSGYESYLWSCPHNGWLSHNCQHSEDAGVICSAAHSWSTPSPDTLPTITLPASTVGSESSLALRLVNGGDRCQGRVEVLYQGSWGTVCDDSWDTNDANVVCRQLGCGWAMSAPGNARFGQGSGPIVLDDVRCSGHESYLWSCPHNGWLSHNCGHSEDAGVICSASQSRPTPSPDTWPTSHASTAGSESSLALRLVNGGDRCQGRVEVLYRGSWGTVCDDYWDTNDANVVCRQLGCGWAMSAPGNARFGQGSGPIVLDDVRCSGHESYLWSCPHNGWLSHNCGHHEDAGVICSASQSQPTPSPDTWPTSHASTAGSESSLALRLVNGGDRCQGRVEVLYRGSWGTVCDDYWDTNDANVVCRQLGCGWATSAPGNARFGQGSGPIVLDDVRCSGHESYLWSCPHNGWLSHNCGHHEDAGVICSASQSQPTPSPDTWPTSHASTAGSESSLALRLVNGGDRCQGRVEVLYRGSWGTVCDDYWDTNDANVVCRQLGCGWATSAPGNARFGQGSGPIVLDDVRCSGHESYLWSCPHNGWLSHNCGHHEDAGVICSASQSQPTPSPDTWPTSHASTAGSESSLALRLVNGGDRCQGRVEVLYRGSWGTVCDDYWDTNDANVVCRQLGCGWATSAPGNARFGQGSGPIVLDDVRCSGHESYLWSCPHNGWLSHNCGHHEDAGVICSASQSQPTPSPDTWPTSRASTAGSESTLALRLVNGGDRCRGRVEVLYQGSWGTVCDDYWDTNDANVVCRQLGCGWAMSAPGNAQFGQGSGPIVLDDVRCSGHESYLWSCPHNGWLSHNCGHHEDAGVICSAAQSQSTPRPDTWLTTNLPALTVGSESSLALRLVNGGDRCRGRVEVLYRGSWGTVCDDSWDTNDANVVCRQLGCGWAMSAPGNARFGQGSGPIVLDDVRCSGNESYLWSCPHKGWLTHNCGHHEDAGVICSATQINSTTTDWWHPTTTTTARPSSNCGGFLFYASGTFSSPSYPAYYPNNAKCVWEIEVNSGYRINLGFSNLKLEAHHNCSFDYVEIFDGSLNSSLLLGKICNDTRQIFTSSYNRMTIHFRSDISFQNTGFLAWYNSFPSDATLRLVNLNSSYGLCAGRVEIYHGGTWGTVCDDSWTIQEAEVVCRQLGCGRAVSALGNAYFGSGSGPITLDDVECSGTESTLWQCRNRGWFSHNCNHREDAGVICSGNHLSTPAPFLNITRPNTDYSCGGFLSQPSGDFSSPFYPGNYPNNAKCVWDIEVQNNYRVTVIFRDVQLEGGCNYDYIEVFDGPYRSSPLIARVCDGARGSFTSSSNFMSIRFISDHSITRRGFRAEYYSSPSNDSTNLLCLPNHMQASVSRSYLQSLGFSASDLVISTWNGYYECRPQITPNLVIFTIPYSGCGTFKQADNDTIDYSNFLTAAVSGGIIKRRTDLRIHVSCRMLQNTWVDTMYIANDTIHVANNTIQVEEVQYGNFDVNISFYTSSSFLYPVTSRPYYVDLNQDLYVQAEILHSDAVLTLFVDTCVASPYSNDFTSLTYDLIRSGCVRDDTYGPYSSPSLRIARFRFRAFHFLNRFPSVYLRCKMVVCRAYDPSSRCYRGCVLRSKRDVGSYQEKVDVVLGPIQLQTPPRREEEPR

SEQ ID NO: 101 - protein, 2532 aa, Homo sapiens
MGISTVILEMCLLWGQVLSTGGWIPRTTDYASLIPSEVPLDPTVAEGSPFPSESTLESTVAEGSPISLESTLESTVAEGSLIPSESTLESTVAEGSDSGLALRLVNGDGRCQGRVEILYRGSWGTVCDDSWDTNDANVVCRQLGCGWAMSAPGNAWFGQGSGPIALDDVRCSGHESYLWSCPHNGWLSHNCGHGEDAGVICSAAQPQSTLRPESWPVRISPPVPTEGSESSLALRLVNGGDRCRGRVEVLYRGSWGTVCDDYWDTNDANVVCRQLGCGWAMSAPGNAQFGQGSGPIVLDDVRCSGHESYLWSCPHNGWLTHNCGHSEDAGVICSAPQSRPTPSPDTWPTSHASTAGPESSLALRLVNGGDRCQGRVEVLYRGSWGTVCDDSWDTSDANVVCRQLGCGWATSAPGNARFGQGSGPIVLDDVRCSGYESYLWSCPHNGWLSHNCQHSEDAGVICSDTLPTITLPASTVGSESSLALRLVNGGDRCQGRVEVLYRGSWGTVCDDSWDTNDANVVCRQLGCGWAMLAPGNARFGQGSGPIVLDDVRCSGNESYLWSCPHNGWLSHNCGHSEDAGVICSGPESSLALRLVNGGDRCQGRVEVLYRGSWGTVCDDSWDTNDANVVCRQLGCGWATSAPGNARFGQGSGPIVLDDVRCSGHESYLWSCPNNGWLSHNCGHHEDAGVICSAAQSRSTPRPDTLSTITLPPSTVGSESSLTLRLVNGSDRCQGRVEVLYRGSWGTVCDDSWDTNDANVVCRQLGCGWATSAPGNARFGQGSGPIVLDDVRCSGHESYLWSCPHNGWLSHNCGHHEDAGVICSVSQSRPTPSPDTWPTSHASTAGPESSLALRLVNGGDRCQGRVEVLYRGSWGTVCDDSWDTSDANVVCRQLGCGWATSAPGNARFGQGSGPIVLDDVRCSGYESYLWSCPHNGWLSHNCQHSEDAGVICSAAHSWSTPSPDTLPTITLPASTVGSESSLALRLVNGGDRCQGRVEVLYQGSWGTVCDDSWDTNDANVVCRQLGCGWAMSAPGNARFGQGSGPIVLDDVRCSGHESYLWSCPHNGWLSHNCGHSEDAGVICSASQSRPTPSPDTWPTSHASTAGSESSLALRLVNGGDRCQGRVEVLYRGSWGTVCDDYWDTNDANVVCRQLGCGWAMSAPGNARFGQGSGPIVLDDVRCSGHESYLWSCPHNGWLSHNCGHHEDAGVICSASQSQPTPSPDTWPTSHASTAGSESSLALRLVNGGDRCQGRVEVLYRGSWGTVCDDYWDTNDANVVCRQLGCGWATSAPGNARFGQGSGPIVLDDVRCSGHESYLWSCPHNGWLSHNCGHHEDAGVICSASQSQPTPSPDTWPTSHASTAGSESSLALRLVNGGDRCQGRVEVLYRGSWGTVCDDYWDTNDANVVCRQLGCGWATSAPGNARFGQGSGPIVLDDVRCSGHESYLWSCPHNGWLSHNCGHHEDAGVICSASQSQPTPSPDTWPTSHASTAGSESSLALRLVNGGDRCQGRVEVLYRGSWGTVCDDYWDTNDANVVCRQLGCGWATSAPGNARFGQGSGPIVLDDVRCSGHESYLWSCPHNGWLSHNCGHHEDAGVICSASQSQPTPSPDTWPTSRASTAGSESTLALRLVNGGDRCRGRVEVLYQGSWGTVCDDYWDTNDANVVCRQLGCGWAMSAPGNAQFGQGSGPIVLDDVRCSGHESYLWSCPHNGWLSHNCGHHEDAGVICSAAQSQSTPRPDTWLTTNLPALTVGSESSLALRLVNGGDRCRGRVEVLYRGSWGTVCDDSWDTNDANVVCRQLGCGWAMSAPGNARFGQGSGPIVLDDVRCSGNESYLWSCPHKGWLTHNCGHHEDAGVICSATQINSTTTDWWHPTTTTTARPSSNCGGFLFYASGTFSSPSYPAYYPNNAKCVWEIEVNSGYRINLGFSNLKLEAHHNCSFDYVEIFDGSLNSSLLLGKICNDTRQIFTSSYNRMTIHFRSDISFQNTGFLAWYNSFPSDATLRLVNLNSSYGLCAGRVEIYHGGTWGTVCDDSWTIQEAEVVCRQLGCGRAVSALGNAYFGSGSGPITLDDVECSGTESTLWQCRNRGWFSHNCNHREDAGVICSGNHLSTPAPFLNITRPNTDYSCGGFLSQPSGDFSSPFYPGNYPNNAKCVWDIEVQNNYRVTVIFRDVQLEGGCNYDYIEVFDGPYRSSPLIARVCDGARGSFTSSSNFMSIRFISDHSITRRGFRAEYYSSPSNDSTNLLCLPNHMQASVSRSYLQSLGFSASDLVISTWNGYYECRPQITPNLVIFTIPYSGCGTFKQADNDTIDYSNFLTAAVSGGIIKRRTDLRIHVSCRMLQNTWVDTMYIANDTIHVANNTIQVEEVQYGNFDVNISFYTSSSFLYPVTSRPYYVDLNQDLYVQAEILHSDAVLTLFVDTCVASPYSNDFTSLTYDLIRSGCVRDDTYGPYSSPSLRIARFRFRAFHFLNRFPSVYLRCKMVVCRAYDPSSRCYRGCVLRSKRDVGSYQEKVDVVLGPIQLQTPPRREEEPR

SEQ ID NO: 102 - protein, 1662 aa, Homo sapiens
MGISTVILEMCLLWGQVLSTGGWIPRTTDYASLIPSEVPLDPTVAEGSPFPSESTLESTVAEGSPISLESTLESTVAEGSLIPSESTLESTVAEGSDSGLALRLVNGDGRCQGRVEILYRGSWGTVCDDSWDTNDANVVCRQLGCGWAMSAPGNAWFGQGSGPIALDDVRCSGHESYLWSCPHNGWLSHNCGHGEDAGVICSAAQPQSTLRPESWPVRISPPVPTEGSESSLALRLVNGGDRCRGRVEVLYRGSWGTVCDDYWDTNDANVVCRQLGCGWAMSAPGNAQFGQGSGPIVLDDVRCSGHESYLWSCPHNGWLTHNCGHSEDAGVICSAPQSRPTPSPDTWPTSHASTAGPESSLALRLVNGGDRCQGRVEVLYRGSWGTVCDDSWDTSDANVVCRQLGCGWATSAPGNARFGQGSGPIVLDDVRCSGYESYLWSCPHNGWLSHNCQHSEDAGVICSAAHSWSTPRPGERPRPDTLPTITLPASTVGSESSLALRLVNGGDRCQGRVEVLYQGSWGTVCDDSWDTNDANVVCRQLGCGWAMSAPGNARFGQGSGPIVLDDVRCSGHESYLWSCPHNGWLSHNCGHSEDAGVICSASQSRPTPSPDTWPTSHASTAGSESSLALRLVNGGDRCQGRVEVLYRGSWGTVCDDYWDTNDANVVCRQLGCGWATSAPGNARFGQGSGPIVLDDVRCSGHESYLWSCPHNGWLSHNCGHHEDAGVICSASQSQPTPSPDTWPTSRASTAGSESTLALRLVNGGDRCRGRVEVLYQGSWGTVCDDYWDTNDANVVCRQLGCGWAMSAPGNAQFGQGSGPIVLDDVRCSGHESYLWSCPHNGWLSHNCGHHEDAGVICSAAQSQSTPRPDTWLTTNLPALTVGSESSLALRLVNGGDRCRGRVEVLYRGSWGTVCDDSWDTNDANVVCRQLGCGWAMSAPGNARFGQGSGPIVLDDVRCSGNESYLWSCPHKGWLTHNCGHHEDAGVICSATQINSTTTDWWHPTTTTTARPSSNCGGFLFYASGTFSSPSYPAYYPNNAKCVWEIEVNSGYRINLGFSNLKLEAHHNCSFDYVEIFDGSLNSSLLLGKICNDTRQIFTSSYNRMTIHFRSDISFQNTGFLAWYNSFPSDATLRLVNLNSSYGLCAGRVEIYHGGTWGTVCDDSWTIQEAEVVCRQLGCGRAVSALGNAYFGSGSGPITLDDVECSGTESTLWQCRNRGWFSHNCNHREDAGVICSGNHLSTPAPFLNITRPNTDYSCGGFLSQPSGDFSSPFYPGNYPNNAKCVWDIEVQNNYRVTVIFRDVQLEGGCNYDYIEVFDGPYRSSPLIARVCDGARGSFTSSSNFMSIRFISDHSITRRGFRAEYYSSPSNDSTNLLCLPNHMQASVSRSYLQSLGFSASDLVISTWNGYYECRPQITPNLVIFTIPYSGCGTFKQADNDTIDYSNFLTAAVSGGIIKRRTDLRIHVSCRMLQNTWVDTMYIANDTIHVANNTIQVEEVQYGNFDVNISFYTSSSFLYPVTSRPYYVDLNQDLYVQAEILHSDAVLTLFVDTCVASPYSNDFTSLTYDLIRSGCVRDDTYGPYSSPSLRIARFRFRAFHFLNRFPSVYLRCKMVVCRAYDPSSRCYRGCVLRSKRDVGSYQEKVDVVLGPIQLQTPPRREEEPR

SEQ ID NO: 103 - protein, 2393 aa, Homo sapiens
MGISTVILEMCLLWGQVLSTGGWIPRTTDYASLIPSEVPLDPTVAEGSPFPSESTLESTVAEGSPISLESTLESTVAEGSLIPSESTLESTVAEGSDSGLALRLVNGDGRCQGRVEILYRGSWGTVCDDSWDTNDANVVCRQLGCGWAMSAPGNAWFGQGSGPIALDDVRCSGHESYLWSCPHNGWLSHNCGHGEDAGVICSAAQPQSTLRPESWPVRISPPVPTEGSESSLALRLVNGGDRCRGRVEVLYRGSWGTVCDDYWDTNDANVVCRQLGCGWAMSAPGNAQFGQGSGPIVLDDVRCSGHESYLWSCPHNGWLTHNCGHSEDAGVICSAPQSRPTPSPDTWPTSHASTAGPESSLALRLVNGGDRCQGRVEVLYRGSWGTVCDDSWDTSDANVVCRQLGCGWATSAPGNARFGQGSGPIVLDDVRCSGYESYLWSCPHNGWLSHNCQHSEDAGVICSAAHSWSTPSPDTLPTITLPASTVGSESSLALRLVNGGDRCQGRVEVLYRGSWGTVCDDSWDTNDANVVCRQLGCGWAMLAPGNARFGQGSGPIVLDDVRCSGNESYLWSCPHNGWLSHNCGHSEDAGVICSGPESSLALRLVNGGDRCQGRVEVLYRGSWGTVCDDSWDTNDANVVCRQLGCGWATSAPGNARFGQGSGPIVLDDVRCSGHESYLWSCPNNGWLSHNCGHHEDAGVICSAAQSRSTPRPDTLSTITLPPSTVGSESSLTLRLVNGSDRCQGRVEVLYRGSWGTVCDDSWDTNDANVVCRQLGCGWATSAPGNARFGQGSGPIVLDDVRCSGHESYLWSCPHNGWLSHNCGHHEDAGVICSVSQSRPTPSPDTWPTSHASTAGPESSLALRLVNGGDRCQGRVEVLYRGSWGTVCDDSWDTSDANVVCRQLGCGWATSAPGNARFGQGSGPIVLDDVRCSGYESYLWSCPHNGWLSHNCQHSEDAGVICSAAHSWSTPSPDTLPTITLPASTVGSESSLALRLVNGGDRCQGRVEVLYQGSWGTVCDDSWDTNDANVVCRQLGCGWAMSAPGNARFGQGSGPIVLDDVRCSGHESYLWSCPHNGWLSHNCGHSEDAGVICSASQSRPTPSPDTWPTSHASTAGSESSLALRLVNGGDRCQGRVEVLYRGSWGTVCDDYWDTNDANVVCRQLGCGWAMSAPGNARFGQGSGPIVLDDVRCSGHESYLWSCPHNGWLSHNCGHHEDAGVICSASQSQPTPSPDTWPTSHASTAGSESSLALRLVNGGDRCQGRVEVLYRGSWGTVCDDYWDTNDANVVCRQLGCGWATSAPGNARFGQGSGPIVLDDVRCSGHESYLWSCPHNGWLSHNCGHHEDAGVICSASQSQPTPSPDTWPTSHASTAGSESSLALRLVNGGDRCQGRVEVLYRGSWGTVCDDYWDTNDANVVCRQLGCGWATSAPGNARFGQGSGPIVLDDVRCSGHESYLWSCPHNGWLSHNCGHHEDAGVICSASQSQPTPSPDTWPTSRASTAGSESTLALRLVNGGDRCRGRVEVLYQGSWGTVCDDYWDTNDANVVCRQLGCGWAMSAPGNAQFGQGSGPIVLDDVRCSGHESYLWSCPHNGWLSHNCGHHEDAGVICSAAQSQSTPRPDTWLTTNLPALTVGSESSLALRLVNGGDRCRGRVEVLYRGSWGTVCDDSWDTNDANVVCRQLGCGWAMSAPGNARFGQGSGPIVLDDVRCSGNESYLWSCPHKGWLTHNCGHHEDAGVICSGPSSNCGGFLFYASGTFSSPSYPAYYPNNAKCVWEIEVNSGYRINLGFSNLKLEAHHNCSFDYVEIFDGSLNSSLLLGKICNDTRQIFTSSYNRMTIHFRSDISFQNTGFLAWYNSFPSDATLRLVNLNSSYGLCAGRVEIYHGGTWGTVCDDSWTIQEAEVVCRQLGCGRAVSALGNAYFGSGSGPITLDDVECSGTESTLWQCRNRGWFSHNCNHREDAGVICSGNHLSTPAPFLNITRPNTDYSCGGFLSQPSGDFSSPFYPGNYPNNAKCVWDIEVQNNYRVTVIFRDVQLEGGCNYDYIEVFDGPYRSSPLIARVCDGARGSFTSSSNFMSIRFISDHSITRRGFRAEYYSSPSNDSTNLLCLPNHMQASVSRSYLQSLGFSASDLVISTWNGYYECRPQITPNLVIFTIPYSGCGTFKQADNDTIDYSNFLTAAVSGGIIKRRTDLRIHVSCRMLQNTWVDTMYIANDTIHVANNTIQVEEVQYGNFDVNISFYTSSSFLYPVTSRPYYVDLNQDLYVQAEILHSDAVLTLFVDTCVASPYSNDFTSLTYDLIRSGCVRDDTYGPYSSPSLRIARFRFRAFHFLNRFPSVYLRCKMVVCRAYDPSSRCYRGCVLRSKRDVGSYQEKVDVVLGPIQLQTPPRREEEPR

SEQ ID NO: 104 - protein, 1133 aa, Homo sapiens
MGISTVILEMCLLWGQVLSTGGWIPRTTDYASLIPSEVPLDPTVAEGSPFPSESTLESTVAEGSPISLESTLESTVAEGSLIPSESTLESTVAEGSDSGLALRLVNGDGRCQGRVEILYRGSWGTVCDDSWDTNDANVVCRQLGCGWAMSAPGNAWFGQGSGPIALDDVRCSGHESYLWSCPHNGWLSHNCGHGEDAGVICSAPQSRPTPSPDTWPTSHASTAGSESSLALRLVNGGDRCQGRVEVLYRGSWGTVCDDYWDTNDANVVCRQLGCGWATSAPGNARFGQGSGPIVLDDVRCSGHESYLWSCPHNGWLSHNCGHHEDAGVICSASQSQPTPSPDTWPTSRASTAGSESTLALRLVNGGDRCRGRVEVLYQGSWGTVCDDYWDTNDANVVCRQLGCGWAMSAPGNAQFGQGSGPIVLDDVRCSGHESYLWSCPHNGWLSHNCGHHEDAGVICSATQINSTTTDWWHPTTTTTARPSSNCGGFLFYASGTFSSPSYPAYYPNNAKCVWEIEVNSGYRINLGFSNLKLEAHHNCSFDYVEIFDGSLNSSLLLGKICNDTRQIFTSSYNRMTIHFRSDISFQNTGFLAWYNSFPSDATLRLVNLNSSYGLCAGRVEIYHGGTWGTVCDDSWTIQEAEVVCRQLGCGRAVSALGNAYFGSGSGPITLDDVECSGTESTLWQCRNRGWFSHNCNHREDAGVICSGNHLSTPAPFLNITRPNTDYSCGGFLSQPSGDFSSPFYPGNYPNNAKCVWDIEVQNNYRVTVIFRDVQLEGGCNYDYIEVFDGPYRSSPLIARVCDGARGSFTSSSNFMSIRFISDHSITRRGFRAEYYSSPSNDSTNLLCLPNHMQASVSRSYLQSLGFSASDLVISTWNGYYECRPQITPNLVIFTIPYSGCGTFKQADNDTIDYSNFLTAAVSGGIIKRRTDLRIHVSCRMLQNTWVDTMYIANDTIHVANNTIQVEEVQYGNFDVNISFYTSSSFLYPVTSRPYYVDLNQDLYVQAEILHSDAVLTLFVDTCVASPYSNDFTSLTYDLIRSGCVRDDTYGPYSSPSLRIARFRFRAFHFLNRFPSVYLRCKMVVCRAYDPSSRCYRGCVLRSKRDVGSYQEKVDVVLGPIQLQTPPRREEEPR

SEQ ID NO: 105 - protein, 5405 aa, Homo sapiens
MGALWSWWILWAGATLLWGLTQEASVDLKNTGREEFLTAFLQNYQLAYSKAYPRLLISSLSESPASVSILSQADNTSKKVTVRPGESVMVNISAKAEMIGSKIFQHAVVIHSDYAISVQALNAKPDTAELTLLRPIQALGTEYFVLTPPGTSARNVKEFAVVAGAAGASVSVTLKGSVTFNGKFYPAGDVLRVTLQPYNVAQLQSSVDLSGSKVTASSPVAVLSGHSCAQKHTTCNHVVEQLLPTSAWGTHYVVPTLASQSRYDLAFVVASQATKLTYNHGGITGSRGLQAGDVVEFEVRPSWPLYLSANVGIQVLLFGTGAIRNEVTYDPYLVLIPDVAAYCPAYVVKSVPGCEGVALVVAQTKAISGLTIDGHAVGAKLTWEAVPGSEFSYAEVELGTADMIHTAEATTNLGLLTFGLAKAIGYATAADCGRTVLSPVEPSCEGMQCAAGQRCQVVGGKAGCVAESTAVCRAQGDPHYTTFDGRRYDMMGTCSYTMVELCSEDDTLPAFSVEAKNEHRGSRRVSYVGLVTVRAYSHSVSLTRGEVGFVLVDNQRSRLPVSLSEGRLRVYQSGPRAVVELVFGLVVTYDWDCQLALSLPARFQDQVCGLCGNYNGDPADDFLTPDGALAPDAVEFASSWKLDDGDYLCEDGCQNNCPACTPGQAQHYEGDRLCGMLTKLDGPFAVCHDTLDPRPFLEQCVYDLCVVGGERLSLCRGLSAYAQACLELGISVGDWRSPANCPLSCPANSRYELCGPACPTSCNGAAAPSNCSGRPCVEGCVCLPGFVASGGACVPASSCGCTFQGLQLAPGQEVWADELCQRRCTCNGATHQVTCRDKQSCPAGERCSVQNGLLGCYPDRFGTCQGSGDPHYVSFDGRRFDFMGTCTYLLVGSCGQNAALPAFRVLVENEHRGSQTVSYTRAVRVEARGVKVAVRREYPGQVLVDDVLQYLPFQAADGQVQVFRQGRDAVVRTDFGLTVTYDWNARVTAKVPSSYAEALCGLCGNFNGDPADDLALRGGGQAANALAFGNSWQEETRPGCGATEPGDCPKLDSLVAQQLQSKNECGILADPKGPFRECHSKLDPQGAVRDCVYDRCLLPGQSGPLCDALATYAAACQAAGATVHPWRSEELCPLSCPPHSHYEACSYGCPLSCGDLPVPGGCGSECHEGCVCDEGFALSGESCLPLASCGCVHQGTYHPPGQTFYPGPGCDSLCHCQEGGLVSCESSSCGPHEACQPSGGSLGCVAVGSSTCQASGDPHYTTFDGRRFDFMGTCVYVLAQTCGTRPGLHRFAVLQENVAWGNGRVSVTRVITVQVANFTLRLEQRQWKVTVNGVDMKLPVVLANGQIRASQHGSDVVIETDFGLRVAYDLVYYVRVTVPGNYYQQMCGLCGNYNGDPKDDFQKPNGSQAGNANEFGNSWEEVVPDSPCLPPTPCPPGSEDCIPSHKCPPELEKKYQKEEFCGLLSSPTGPLSSCHKLVDPQGPLKDCIFDLCLGGGNLSILCSNIHAYVSACQAAGGHVEPWRTETFCPMECPPNSHYELCADTCSLGCSALSAPPQCQDGCAEGCQCDSGFLYNGQACVPIQQCGCYHNGVYYEPEQTVLIDNCRQQCTCHAGKGMVCQEHSCKPGQVCQPSGGILSCVTKDPCHGVTCRPQETCKEQGGQGVCLPNYEATCWLWGDPHYHSFDGRKFDFQGTCNYVLATTGCPGVSTQGLTPFTVTTKNQNRGNPAVSYVRVVTVAALGTNISIHKDEIGKVRVNGVLTALPVSVADGRISVTQGASKALLVADFGLQVSYDWNWRVDVTLPSSYHGAVCGLCGNMDRNPNNDQVFPNGTLAPSIPIWGGSWRAPGWDPLCWDECRGSCPTCPEDRLEQYEGPGFCGPLAPGTGGPFTTCHAHVPPESFFKGCVLDVCMGGGDRDILCKALASYVAACQAAGVVIEDWRAQVGCEITCPENSHYEVCGSPCPASCPSPAPLTTPAVCEGPCVEGCQCDAGFVLSADRCVPLNNGCGCWANGTYHEAGSEFWADGTCSQWCRCGPGGGSLVCTPASCGLGEVCGLLPSGQHGCQPVSTAECQAWGDPHYVTLDGHRFNFQGTCEYLLSAPCHGPPLGAENFTVTVANEHRGSQAVSYTRSVTLQIYNHSLTLSARWPRKLQVDGVFVTLPFQLDSLLHAHLSGADVVVTTTSGLSLAFDGDSFVRLRVPAAYAGSLCGLCGNYNQDPADDLKAVGGKPAGWQVGGAQGCGECVSKPCPSPCTPEQQESFGGPDACGVISATDGPLAPCHGLVPPAQYFQGCLLDACQVQGHPGGLCPAVATYVAACQAAGAQLREWRRPDFCPFQCPAHSHYELCGDSCPGSCPSLSAPEGCESACREGCVCDAGFVLSGDTCVPVGQCGCLHDDRYYPLGQTFYPGPGCDSLCRCREGGEVSCEPSSCGPHETCRPSGGSLGCVAVGSTTCQASGDPHYTTFDGRRFDFMGTCVYVLAQTCGTRPGLHRFAVLQENVAWGNGRVSVTRVITVQVANFTLRLEQRQWKVTVNGVDMKLPVVLANGQIRASQHGSDVVIETDFGLRVAYDLVYYVRVTVPGNYYQLMCGLCGNYNGDPKDDFQKPNGSQAGNANEFGNSWEEVVPDSPCLPPPTCPPGSEGCIPSEECPPELEKKYQKEEFCGLLSSPTGPLSSCHKLVDPQGPLKDCIFDLCLGGGNLSILCSNIHAYVSACQAAGGQVEPWRNETFCPMECPQNSHYELCADTCSLGCSALSAPLQCPDGCAEGCQCDSGFLYNGQACVPIQQCGCYHNGAYYEPEQTVLIDNCRQQCTCHVGKVVVCQEHSCKPGQVCQPSGGILSCVNKDPCHGVTCRPQETCKEQGGQGVCLPNYEATCWLWGDPHYHSFDGRKFDFQGTCNYVLATTGCPGVSTQGLTPFTVTTKNQNRGNPAVSYVRVVTVAALGTNISIHKDEIGKVRVNGVLTALPVSVADGRISVTQGASKALLVADFGLQVSYDWNWRVDVTLPSSYHGAVCGLCGNMDRNPNNDQVFPNGTLAPSIPIWGGSWRAPGWDPLCWDECRGSCPTCPEDRLEQYEGPGFCGPLAPGTGGPFTTCHAHVPPESFFKGCVLDVCMGGGDRDILCKALASYVAACQAAGVVIEDWRAQVGCEITCPENSHYEVCGPPCPASCPSPAPLTTPAVCEGPCVEGCQCDAGFVLSADRCVPLNNGCGCWANGTYHEAGSEFWADGTCSQWCRCGPGGGSLVCTPASCGLGEVCGLLPSGQHGCQPVSTAECQAWGDPHYVTLDGHRFDFQGTCEYLLSAPCHGPPLGAENFTVTVANEHRGSQAVSYTRSVTLQIYNHSLTLSARWPRKLQVDGVFVTLPFQLDSLLHAHLSGADVVVTTTSGLSLAFDGDSFVRLRVPAAYAGSLCGLCGNYNQDPADDLKAVGGKPAGWQVGGAQGCGECVSKPCPSPCTPEQQESFGGPDACGVISATDGPLAPCHGLVPPAQYFQGCLLDACQVQGHPGGLCPAVATYVAACQAAGAQLREWRRPDFCPFQCPAHSHYELCGDSCPGSCPSLSAPEGCESACREGCVCDAGFVLSGDTCVPVGQCGCLHDDRYYPLGQTFYPGPGCDSLCRCREGGEVSCEPSSCGPHETCRPSGGSLGCVAVGSTTCQASGDPHYTTFDGHRFDFMGTCVYVLAQTCGTRPGLHRFAVLQENVAWGNGRVSVTRVITVQVANFTLRLEQRQWKVTVNGVDMKLPVVLANGQIRASQHGSDVVIETDFGLRVAYDLVYYVRVTVPGNYYQLMCGLCGNYNGDPKDDFQKPNGSQAGNANEFGNSWEEVVPDSPCLPPPTCPPGSAGCIPSDKCPPELEKKYQKEEFCGLLSSPTGPLSSCHKLVDPQGPLKDCIFDLCLGGGNLSILCSNIHAYVSACQAAGGHVEPWRNETFCPMECPQNSHYELCADTCSLGCSALSAPLQCPDGCAEGCQCDSGFLYNGQACVPIQQCGCYHNGVYYEPEQTVLIDNCRQQCTCHVGKVVVCQEHSCKPGQVCQPSGGILSCVTKDPCHGVTCRPQETCKEQGGQGVCLPNYEATCWLWGDPHYHSFDGRKFDFQGTCNYVLATTGCPGVSTQGLTPFTVTTKNQNRGNPAVSYVRVVTVAALGTNISIHKDEIGKVRVNGVLTALPVSVADGRISVAQGASKALLVADFGLQVSYDWNWRVDVTLPSSYHGAVCGLCGNMDRNPNNDQVFPNGTLAPSIPIWGGSWRAPGWDPLCWDECRGSCPTCPEDRLEQYEGPGFCGPLSSGTGGPFTTCHAHVPPESFFKGCVLDVCMGGGDRDILCKALASYVAACQAAGVVIEDWRAQVGCEITCPENSHYEVCGPPCPASCPSPAPLTTPAVCEGPCVEGCQCDAGFVLSADRCVPLNNGCGCWANGTYHEAGSEFWADGTCSQWCRCGPGGGSLVCTPASCGLGEVCGLLPSGQHGCQPVSTAECQAWGDPHYVTLDGHRFDFQGTCEYLLSAPCHGPPLGAENFTVTVANEHRGSQAVSYTRSVTLQIYNHSLTLSARWPRKLQVDGVFVALPFQLDSLLHAHLSGADVVVTTTSGLSLAFDGDSFVRLRVPAAYAASLCGLCGNYNQDPADDLKAVGGKPAGWQVGGAQGCGECVSKPCPSPCTPEQQESFGGPDACGVISATDGPLAPCHGLVPPAQYFQGCLLDACQVQGHPGGLCPAVATYVAACQAAGAQLGEWRRPDFCPLQCPAHSHYELCGDSCPVSCPSLSAPEGCESACREGCVCDAGFVLSGDTCVPVGQCGCLHDGRYYPLGEVFYPGPECERRCECGPGGHVTCQEGAACGPHEECRLEDGVQACHATGCGRCLANGGIHYITLDGRVYDLHGSCSYVLAQVCHPKPGDEDFSIVLEKNAAGDLQRLLVTVAGQVVSLAQGQQVTVDGEAVALPVAVGRVRVTAEGRNMVLQTTKGLRLLFDGDAHLLMSIPSPFRGRLCGLCGNFNGNWSDDFVLPNGSAASSVETFGAAWRAPGSSKGCGEGCGPQGCPVCLAEETAPYESNEACGQLRNPQGPFATCQAVLSPSEYFRQCVYDLCAQKGDKAFLCRSLAAYTAACQAAGVAVKPWRTDSFCPLHCPAHSHYSICTRTCQGSCAALSGLTGCTTRCFEGCECDDRFLLSQGVCIPVQDCGCTHNGRYLPVNSSLLTSDCSERCSCSSSSGLTCQAAGCPPGRVCEVKAEARNCWATRGLCVLSVGANLTTFDGARGATTSPGVYELSSRCPGLQNTIPWYRVVAEVQICHGKTEAVGQVHIFFQDGMVTLTPNKGVWVNGLRVDLPAEKLASVSVSRTPDGSLLVRQKAGVQVWLGANGKVAVIVSNDHAGKLCGACGNFDGDQTNDWHDSQEKPAMEKWRAQDFSPCYG

SEQ ID NO: 106 - protein, 979 aa, Homo sapiens
MALFAVFQTTFFLTLLSLRTYQSEVLAERLPLTPVSLKVSTNSTRQSLHLQWTVHNLPYHQELKMVFQIQISRIETSNVIWVGNYSTTVKWNQVLHWSWESELPLECATHFVRIKSLVDDAKFPEPNFWSNWSSWEEVSVQDSTGQDILFVFPKDKLVEEGTNVTICYVSRNIQNNVSCYLEGKQIHGEQLDPHVTAFNLNSVPFIRNKGTNIYCEASQGNVSEGMKGIVLFVSKVLEEPKDFSCETEDFKTLHCTWDPGTDTALGWSKQPSQSYTLFESFSGEKKLCTHKNWCNWQITQDSQETYNFTLIAENYLRKRSVNILFNLTHRVYLMNPFSVNFENVNATNAIMTWKVHSIRNNFTYLCQIELHGEGKMMQYNVSIKVNGEYFLSELEPATEYMARVRCADASHFWKWSEWSGQNFTTLEAAPSEAPDVWRIVSLEPGNHTVTLFWKPLSKLHANGKILFYNVVVENLDKPSSSELHSIPAPANSTKLILDRCSYQICVIANNSVGASPASVIVISADPENKEVEEERIAGTEGGFSLSWKPQPGDVIGYVVDWCDHTQDVLGDFQWKNVGPNTTSTVISTDAFRPGVRYDFRIYGLSTKRIACLLEKKTGYSQELAPSDNPHVLVDTLTSHSFTLSWKDYSTESQPGFIQGYHVYLKSKARQCHPRFEKAVLSDGSECCKYKIDNPEEKALIVDNLKPESFYEFFITPFTSAGEGPSATFTKVTTPDEHSSMLIHILLPMVFCVLLIMVMCYLKSQWIKETCYPDIPDPYKSSILSLIKFKENPHLIIMNVSDCIPDAIEVVSKPEGTKIQFLGTRKSLTETELTKPNYLYLLPTEKNHSGPGPCICFENLTYNQAASDSGSCGHVPVSPKAPSMLGLMTSPENVLKALEKNYMNSLGEIPAGETSLNYVSQLASPMFGDKDSLPTNPVEAPHCSEYKMQMAVSLRLALPPPTENSSLSSITLLDPGEHYC

SEQ ID NO: 107 - protein, 342 aa, Homo sapiens
MALFAVFQTTFFLTLLSLRTYQSEVLAERLPLTPVSLKVSTNSTRQSLHLQWTVHNLPYHQELKMVFQIQISRIETSNVIWVGNYSTTVKWNQVLHWSWESELPLECATHFVRIKSLVDDAKFPEPNFWSNWSSWEEVSVQDSTGQDILFVFPKDKLVEEGTNVTICYVSRNIQNNVSCYLEGKQIHGEQLDPHVTAFNLNSVPFIRNKGTNIYCEASQGNVSEGMKGIVLFVSKVLEEPKDFSCETEDFKTLHCTWDPGTDTALGWSKQPSQSYTLFESFSGEKKLCTHKNWCNWQITQDSQETYNFTLIAENYLRKRSVNILFNLTHRGETRVVTAHRGH

SEQ ID NO: 108 - protein, 1573 aa, Homo sapiens
MRVLACLLAALVGIQAVERLRLADGPHGCAGRLEVWHGGRWGTVCDDGWDLRDAAVACRQLGCGGALAAPGGAFFGEGAGPVWLSELACRGNEGQLGLCHHRGWKAHICSHEEDAGVVCAGQRVANSRDDSTSPLDGAPWPGLLLELSPSTEEPLVTHAPRPAGNPQNASRKKSPRPKQAKSTRAPLLTTGAPRQERLRLVSGPHRCAGRLEVWHGGRWGTVCDDGWDLRDAAVACRELGCGGALAAPGGARFGPGAGPVWMDDVGCGGGEQALRDCPRSPWGRSNCDHSEDAGLVCTGPAPRLRLADGPHGCAGRLEVWHGGRWGSVCDDAWDLRDAAVACRELGCGGALAAPGGAFFGEGSGPIILDDLRCRGNETALRFCPARPWGQHDCHHREDAGAVCDGMPLGYVPPTAPTDSNNSTPREAASRPPSTMTSQAPGTAGVSPPPASPTVLWEPGPEAGSPQLRLVAGPSKCSGRLEVWHDQRWGTVCDDSWDMRDSAVVCRELGCGGPQQPDPAAGRFGWGAGPIWLDDVGCVGTEASLSDCPAAPWGKHNCAHNEDVGVTCTGPPGLDSISDPFSWSWIPGLGRDRDAWLPGELATKPSASVTASVLEKTTTKAPGKMPKSTKKWVTKNAKRPTTQPPVMPTTKHSRAQSPPDLTSQTTAALTTEASRRPTSEFTRRPTTEAPQRWTSHTTATLTPQAPRERTTKTMAMLTTQGPQEMTSESTIKSIPQASLEPSAEIPEGSPESPKDPAPSPSVSTTGESGLFRVRLADGPNRCAGRLEVWHAGRWGTVCDDNWDLRDATVACWELGCGKVRPRVGKTHYGPGTGPIWLDDMGCKGSEASLSDCPSGAWGKHNCDHEEDVGLTCTGYTDYDDYPPWTWDPTSREDLAKGTTTAGVPGHTLPWRTTRRPGSSSPAIRRLPDTGSKDGYKLPWTWDTPSGRGLAEGTPTAGKLGPTLGAGTTRSPGSPPTLRVHGDTGSPRKPWPERRPPRPAATRTAPPTPSPGPSASPGPPGPALTSDSSRELTPHSALTSEATSDAPDTSPPTPDPASRTNPDLILTSPDFALSTPDSSVVPALTPEPSPTPLPTLPKELTSDPSTPSEVTSLSPTSEQVPESDTTPDLDTTPYSSTVSEYSRSPDPSPSPHPTTTPDPTMAPDPITTLNPTVTPHFPTTPHPTTTPHPTTITHSTMIPDPTTTPQPFTTITHSTMIPDPTTTPQPFTTMQPTTTPHSTTPHPTTTPHPTTITHSTMIPDPTTTPQPFTTMQPTTMPHPTTTPHPTTTPHPTTTPHPTTTPHPTMTPDPTTTPYPTTTPDPTTTPHPTTPDPSSTPVITTVSLPTSLGTELSSPTLAPTVKPSLHPQLTFTAPAPHTSTSQIPTLEPSPALESSPSRSSTATSMDPLSTEDFKPPRSQSPNLTPPPTHTPHSASDLTVSPDPLLSPTAHPLDHPPLDPLTLGPTPGQSPGPHGPCVAPTPPVRVMACEPPALVELVAAVRDVGGQLQRLTQVVEQERQERQALLLGLTQLVEAARGLGQLGEAVKRLAEMAWTTSMPAPTTTTPEEEERPLRGDV

SEQ ID NO: 109 - protein, 951 aa, Homo sapiens
MRVLACLLAALVGIQAVERLRLADGPHGCAGRLEVWHGGRWGTVCDDGWDLRDAAVACRQLGCGGALAAPGGAFFGEGAGPVWLSELACRGNEGQLGLCHHRGWKAHICSHEEDAGVVCAGQRVANSRDDSTSPLDGAPWPGLLLELSPSTEEPLVTHAPRPAGNPQNASRKKSPRPKQAKSTRAPLLTTGAPRQERLRLVSGPHRCAGRLEVWHGGRWGTVCDDGWDLRDAAVACRELGCGGALAAPGGARFGPGAGPVWMDDVGCGGGEQALRDCPRSPWGRSNCDHSEDAGLVCTGPAPRLRLADGPHGCAGRLEVWHGGRWGSVCDDAWDLRDAAVACRELGCGGALAAPGGAFFGEGSGPIILDDLRCRGNETALRFCPARPWGQHDCHHREDAGAVCDGMPLGYVPPTAPTDSNNSTPREAASRPPSTMTSQAPGTAGVSPPPASPTVLWEPGPEAGSPQLRLVAGPSKCSGRLEVWHDQRWGTVCDDSWDMRDSAVVCRELGCGGPQQPDPAAGRFGWGAGPIWLDDVGCVGTEASLSDCPAAPWGKHNCAHNEDVGVTCTGPPGLDSISDPFSWSWIPGLGRDRDAWLPGELATKPSASVTASVLEKTTTKAPGKMPKSTKKWVTKNAKRPTTQPPVMPTTKHSRAQSPPDLTSQTTAALTTEASRRPTSEFTRRPTTEAPQRWTSHTTATLTPQAPRERTTKTMAMLTTQGPQEMTSESTIKSIPQASLEPSAEIPEGSPESPKDPAPSPSVSTTGESGLFRVRLADGPNRCAGRLEVWHAGRWGTVCDDNWDLRDATVACWELGCGKVRPRVGKTHYGPGTGPIWLDDMGCKGSEASLSDCPSGAWGKHNCDHEEDVGLTCTGYTDYDDYPPWTWDPTSREDLAKGTTTAGVPGHTLPWRTTRRPGSSSPAIRRLPDTEPEAGAPRGDAPRSRTARVAAPP

SEQ ID NO: 110 - protein, 4244 aa, Homo sapiens
MMPAQYALTSSLVLLVLLSTARAGPFSSRSNVTLPAPRPPPQPGGHTVGAGVGSPSSQLYEHTVEGGEKQVVFTHRINLPPSTGCGCPPGTEPPVLASEVQALRVRLEILEELVKGLKEQCTGGCCPASAQAGTGQTDVRTLCSLHGVFDLSRCTCSCEPGWGGPTCSDPTDAEIPPSSPPSASGSCPDDCNDQGRCVRGRCVCFPGYTGPSCGWPSCPGDCQGRGRCVQGVCVCRAGFSGPDCSQRSCPRGCSQRGRCEGGRCVCDPGYTGDDCGMRSCPRGCSQRGRCENGRCVCNPGYTGEDCGVRSCPRGCSQRGRCKDGRCVCDPGYTGEDCGTRSCPWDCGEGGRCVDGRCVCWPGYTGEDCSTRTCPRDCRGRGRCEDGECICDTGYSGDDCGVRSCPGDCNQRGRCEDGRCVCWPGYTGTDCGSRACPRDCRGRGRCENGVCVCNAGYSGEDCGVRSCPGDCRGRGRCESGRCMCWPGYTGRDCGTRACPGDCRGRGRCVDGRCVCNPGFTGEDCGSRRCPGDCRGHGLCEDGVCVCDAGYSGEDCSTRSCPGGCRGRGQCLDGRCVCEDGYSGEDCGVRQCPNDCSQHGVCQDGVCICWEGYVSEDCSIRTCPSNCHGRGRCEEGRCLCDPGYTGPTCATRMCPADCRGRGRCVQGVCLCHVGYGGEDCGQEEPPASACPGGCGPRELCRAGQCVCVEGFRGPDCAIQTCPGDCRGRGECHDGSCVCKDGYAGEDCGEEVPTIEGMRMHLLEETTVRTEWTPAPGPVDAYEIQFIPTTEGASPPFTARVPSSASAYDQRGLAPGQEYQVTVRALRGTSWGLPASKTITTMIDGPQDLRVVAVTPTTLELGWLRPQAEVDRFVVSYVSAGNQRVRLEVPPEADGTLLTDLMPGVEYVVTVTAERGRAVSYPASVRANTGSSPLGLLGTTDEPPPSGPSTTQGAQAPLLQQRPQELGELRVLGRDETGRLRVVWTAQPDTFAYFQLRMRVPEGPGAHEEVLPGDVRQALVPPPPPGTPYELSLHGVPPGGKPSDPIIYQGIMDKDEEKPGKSSGPPRLGELTVTDRTSDSLLLRWTVPEGEFDSFVIQYKDRDGQPQVVPVEGPQRSAVITSLDPGRKYKFVLYGFVGKKRHGPLVAEAKILPQSDPSPGTPPHLGNLWVTDPTPDSLHLSWTVPEGQFDTFMVQYRDRDGRPQVVPVEGPERSFVVSSLDPDHKYRFTLFGIANKKRYGPLTADGTTAPERKEEPPRPEFLEQPLLGELTVTGVTPDSLRLSWTVAQGPFDSFMVQYKDAQGQPQAVPVAGDENEVTVPGLDPDRKYKMNLYGLRGRQRVGPESVVAKTAPQEDVDETPSPTELGTEAPESPEEPLLGELTVTGSSPDSLSLFWTVPQGSFDSFTVQYKDRDGRPRAVRVGGKESEVTVGGLEPGHKYKMHLYGLHEGQRVGPVSAVGVTAPQQEETPPATESPLEPRLGELTVTDVTPNSVGLSWTVPEGQFDSFIVQYKDKDGQPQVVPVAADQREVTVYNLEPERKYKMNMYGLHDGQRMGPLSVVIVTAPLPPAPATEASKPPLEPRLGELTVTDITPDSVGLSWTVPEGEFDSFVVQYKDRDGQPQVVPVAADQREVTIPDLEPSRKYKFLLFGIQDGKRRSPVSVEAKTVARGDASPGAPPRLGELWVTDPTPDSLRLSWTVPEGQFDSFVVQFKDKDGPQVVPVEGHERSVTVTPLDAGRKYRFLLYGLLGKKRHGPLTADGTTEARSAMDDTGTKRPPKPRLGEELQVTTVTQNSVGLSWTVPEGQFDSFVVQYKDRDGQPQVVPVEGSLREVSVPGLDPAHRYKLLLYGLHHGKRVGPISAVAITAGREETETETTAPTPPAPEPHLGELTVEEATSHTLHLSWMVTEGEFDSFEIQYTDRDGQLQMVRIGGDRNDITLSGLESDHRYLVTLYGFSDGKHVGPVHVEALTVPEEEKPSEPPTATPEPPIKPRLGELTVTDATPDSLSLSWTVPEGQFDHFLVQYRNGDGQPKAVRVPGHEEGVTISGLEPDHKYKMNLYGFHGGQRMGPVSVVGVTAAEEETPSPTEPSMEAPEPAEEPLLGELTVTGSSPDSLSLSWTVPQGRFDSFTVQYKDRDGRPQVVRVGGEESEVTVGGLEPGRKYKMHLYGLHEGRRVGPVSAVGVTAPEEESPDAPLAKLRLGQMTVRDITSDSLSLSWTVPEGQFDHFLVQFKNGDGQPKAVRVPGHEDGVTISGLEPDHKYKMNLYGFHGGQRVGPVSAVGLTAPGKDEEMAPASTEPPTPEPPIKPRLEELTVTDATPDSLSLSWTVPEGQFDHFLVQYKNGDGQPKATRVPGHEDRVTISGLEPDNKYKMNLYGFHGGQRVGPVSAIGVTAAEEETPSPTEPSMEAPEPPEEPLLGELTVTGSSPDSLSLSWTVPQGRFDSFTVQYKDRDGRPQVVRVGGEESEVTVGGLEPGRKYKMHLYGLHEGRRVGPVSTVGVTAPQEDVDETPSPTEPGTEAPGPPEEPLLGELTVTGSSPDSLSLSWTVPQGRFDSFTVQYKDRDGRPQAVRVGGQESKVTVRGLEPGRKYKMHLYGLHEGRRLGPVSAVGVTEDEAETTQAVPTMTPEPPIKPRLGELTMTDATPDSLSLSWTVPEGQFDHFLVQYRNGDGQPKAVRVPGHEDGVTISGLEPDHKYKMNLYGFHGGQRVGPISVIGVTAAEEETPSPTELSTEAPEPPEEPLLGELTVTGSSPDSLSLSWTIPQGHFDSFTVQYKDRDGRPQVMRVRGEESEVTVGGLEPGRKYKMHLYGLHEGRRVGPVSTVGVTAPEDEAETTQAVPTTTPEPPNKPRLGELTVTDATPDSLSLSWMVPEGQFDHFLVQYRNGDGQPKVVRVPGHEDGVTISGLEPDHKYKMNLYGFHGGQRVGPISVIGVTAAEEETPAPTEPSTEAPEPPEEPLLGELTVTGSSPDSLSLSWTIPQGRFDSFTVQYKDRDGRPQVVRVRGEESEVTVGGLEPGCKYKMHLYGLHEGQRVGPVSAVGVTAPKDEAETTQAVPTMTPEPPIKPRLGELTVTDATPDSLSLSWMVPEGQFDHFLVQYRNGDGQPKAVRVPGHEDGVTISGLEPDHKYKMNLYGFHGGQRVGPVSAIGVTEEETPSPTEPSTEAPEAPEEPLLGELTVTGSSPDSLSLSWTVPQGRFDSFTVQYKDRDGQPQVVRVRGEESEVTVGGLEPGRKYKMHLYGLHEGQRVGPVSTVGITAPLPTPLPVEPRLGELAVAAVTSDSVGLSWTVAQGPFDSFLVQYRDAQGQPQAVPVSGDLRAVAVSGLDPARKYKFLLFGLQNGKRHGPVPVEARTAPDTKPSPRLGELTVTDATPDSVGLSWTVPEGEFDSFVVQYKDKDGRLQVVPVAANQREVTVQGLEPSRKYRFLLYGLSGRKRLGPISADSTTAPLEKELPPHLGELTVAEETSSSLRLSWTVAQGPFDSFVVQYRDTDGQPRAVPVAADQRTVTVEDLEPGKKYKFLLYGLLGGKRLGPVSALGMTAPEEDTPAPELAPEAPEPPEEPRLGVLTVTDTTPDSMRLSWSVAQGPFDSFVVQYEDTNGQPQALLVDGDQSKILISGLEPSTPYRFLLYGLHEGKRLGPLSAEGTTGLAPAGQTSEESRPRLSQLSVTDVTTSSLRLNWEAPPGAFDSFLLRFGVPSPSTLEPHPRPLLQRELMVPGTRHSAVLRDLRSGTLYSLTLYGLRGPHKADSIQGTARTLSPVLESPRDLQFSEIRETSAKVNWMPPPSRADSFKVSYQLADGGEPQSVQVDGQARTQKLQGLIPGARYEVTVVSVRGFEESEPLTGFLTTVPDGPTQLRALNLTEGFAVLHWKPPQNPVDTYDVQVTAPGAPPLQAETPGSAVDYPLHDLVLHTNYTATVRGLRGPNLTSPASITFTTGLEAPRDLEAKEVTPRTALLTWTEPPVRPAGYLLSFHTPGGQNQEILLPGGITSHQLLGLFPSTSYNARLQAMWGQSLLPPVSTSFTTGGLRIPFPRDCGEEMQNGAGASRTSTIFLNGNRERPLNVFCDMETDGGGWLVFQRRMDGQTDFWRDWEDYAHGFGNISGEFWLGNEALHSLTQAGDYSMRVDLRAGDEAVFAQYDSFHVDSAAEYYRLHLEGYHGTAGDSMSYHSGSVFSARDRDPNSLLISCAVSYRGAWWYRNCHYANLNGLYGSTVDHQGVSWYHWKGFEFSVPFTEMKLRPRNFRSPAGGG

SEQ ID NO: 111 - protein, 4242 aa, Homo sapiens
MMPAQYALTSSLVLLVLLSTARAGPFSSRSNVTLPAPRPPPQPGGHTVGAGVGSPSSQLYEHTVEGGEKQVVFTHRINLPPSTGCGCPPGTEPPVLASEVQALRVRLEILEELVKGLKEQCTGGCCPASAQAGTGQTDVRTLCSLHGVFDLSRCTCSCEPGWGGPTCSDPTDAEIPPSSPPSASGSCPDDCNDQGRCVRGRCVCFPGYTGPSCGWPSCPGDCQGRGRCVQGVCVCRAGFSGPDCSQRSCPRGCSQRGRCEGGRCVCDPGYTGDDCGMRSCPRGCSQRGRCENGRCVCNPGYTGEDCGVRSCPRGCSQRGRCKDGRCVCDPGYTGEDCGTRSCPWDCGEGGRCVDGRCVCWPGYTGEDCSTRTCPRDCRGRGRCEDGECICDTGYSGDDCGVRSCPGDCNQRGRCEDGRCVCWPGYTGTDCGSRACPRDCRGRGRCENGVCVCNAGYSGEDCGVRSCPGDCRGRGRCESGRCMCWPGYTGRDCGTRACPGDCRGRGRCVDGRCVCNPGFTGEDCGSRRCPGDCRGHGLCEDGVCVCDAGYSGEDCSTRSCPGGCRGRGQCLDGRCVCEDGYSGEDCGVRQCPNDCSQHGVCQDGVCICWEGYVSEDCSIRTCPSNCHGRGRCEEGRCLCDPGYTGPTCATRMCPADCRGRGRCVQGVCLCHVGYGGEDCGQEEPPASACPGGCGPRELCRAGQCVCVEGFRGPDCAIQTCPGDCRGRGECHDGSCVCKDGYAGEDCGEEVPTIEGMRMHLLEETTVRTEWTPAPGPVDAYEIQFIPTTEGASPPFTARVPSSASAYDQRGLAPGQEYQVTVRALRGTSWGLPASKTITTMIDGPQDLRVVAVTPTTLELGWLRPQAEVDRFVVSYVSAGNQRVRLEVPPEADGTLLTDLMPGVEYVVTVTAERGRAVSYPASVRANTGSSPLGLLGTTDEPPPSGPSTTQGAQAPLLQQRPQELGELRVLGRDETGRLRVVWTAQPDTFAYFQLRMRVPEGPGAHEEVLPGDVRQALVPPPPPGTPYELSLHGVPPGGKPSDPIIYQGIMDKDEEKPGKSSGPPRLGELTVTDRTSDSLLLRWTVPEGEFDSFVIQYKDRDGQPQVVPVEGPQRSAVITSLDPGRKYKFVLYGFVGKKRHGPLVAEAKILPQSDPSPGTPPHLGNLWVTDPTPDSLHLSWTVPEGQFDTFMVQYRDRDGRPQVVPVEGPERSFVVSSLDPDHKYRFTLFGIANKKRYGPLTADGTTAPERKEEPPRPEFLEQPLLGELTVTGVTPDSLRLSWTVAQGPFDSFMVQYKDAQGQPQAVPVAGDENEVTVPGLDPDRKYKMNLYGLRGRQRVGPESVVAKTAPQEDVDETPSPTELGTEAPESPEEPLLGELTVTGSSPDSLSLFWTVPQGSFDSFTVQYKDRDGRPRAVRVGGKESEVTVGGLEPGHKYKMHLYGLHEGQRVGPVSAVGVTAPQQEETPPATESPLEPRLGELTVTDVTPNSVGLSWTVPEGQFDSFIVQYKDKDGQPQVVPVAADQREVTVYNLEPERKYKMNMYGLHDGQRMGPLSVVIVTAPLPPAPATEASKPPLEPRLGELTVTDITPDSVGLSWTVPEGEFDSFVVQYKDRDGQPQVVPVAADQREVTIPDLEPSRKYKFLLFGIQDGKRRSPVSVEAKTVARGDASPGAPPRLGELWVTDPTPDSLRLSWTVPEGQFDSFVVQFKDKDGPQVVPVEGHERSVTVTPLDAGRKYRFLLYGLLGKKRHGPLTADGTTEARSAMDDTGTKRPPKPRLGEELQVTTVTQNSVGLSWTVPEGQFDSFVVQYKDRDGQPQVVPVEGSLREVSVPGLDPAHRYKLLLYGLHHGKRVGPISAVAITAGREETETETTAPTPPAPEPHLGELTVEEATSHTLHLSWMVTEGEFDSFEIQYTDRDGQLQMVRIGGDRNDITLSGLESDHRYLVTLYGFSDGKHVGPVHVEALTVPEEEKPSEPPTATPEPPIKPRLGELTVTDATPDSLSLSWTVPEGQFDHFLVQYRNGDGQPKAVRVPGHEEGVTISGLEPDHKYKMNLYGFHGGQRMGPVSVVGVTAAEEETPSPTEPSMEAPEPAEEPLLGELTVTGSSPDSLSLSWTVPQGRFDSFTVQYKDRDGRPQVVRVGGEESEVTVGGLEPGRKYKMHLYGLHEGRRVGPVSAVGVTAPEEESPDAPLAKLRLGQMTVRDITSDSLSLSWTVPEGQFDHFLVQFKNGDGQPKAVRVPGHEDGVTISGLEPDHKYKMNLYGFHGGQRVGPVSAVGLTAPGKDEEMAPASTEPPTPEPPIKPRLEELTVTDATPDSLSLSWTVPEGQFDHFLVQYKNGDGQPKATRVPGHEDRVTISGLEPDNKYKMNLYGFHGGQRVGPVSAIGVTAAEEETPSPTEPSMEAPEPPEEPLLGELTVTGSSPDSLSLSWTVPQGRFDSFTVQYKDRDGRPQVVRVGGEESEVTVGGLEPGRKYKMHLYGLHEGRRVGPVSTVGVTAPQEDVDETPSPTEPGTEAPGPPEEPLLGELTVTGSSPDSLSLSWTVPQGRFDSFTVQYKDRDGRPQAVRVGGQESKVTVRGLEPGRKYKMHLYGLHEGRRLGPVSAVGVTEDEAETTQAVPTMTPEPPIKPRLGELTMTDATPDSLSLSWTVPEGQFDHFLVQYRNGDGQPKAVRVPGHEDGVTISGLEPDHKYKMNLYGFHGGQRVGPISVIGVTAAEEETPSPTELSTEAPEPPEEPLLGELTVTGSSPDSLSLSWTIPQGHFDSFTVQYKDRDGRPQVMRVRGEESEVTVGGLEPGRKYKMHLYGLHEGRRVGPVSTVGVTEDEAETTQAVPTTTPEPPNKPRLGELTVTDATPDSLSLSWMVPEGQFDHFLVQYRNGDGQPKVVRVPGHEDGVTISGLEPDHKYKMNLYGFHGGQRVGPISVIGVTAAEEETPAPTEPSTEAPEPPEEPLLGELTVTGSSPDSLSLSWTIPQGRFDSFTVQYKDRDGRPQVVRVRGEESEVTVGGLEPGCKYKMHLYGLHEGQRVGPVSAVGVTAPKDEAETTQAVPTMTPEPPIKPRLGELTVTDATPDSLSLSWMVPEGQFDHFLVQYRNGDGQPKAVRVPGHEDGVTISGLEPDHKYKMNLYGFHGGQRVGPVSAIGVTEEETPSPTEPSTEAPEAPEEPLLGELTVTGSSPDSLSLSWTVPQGRFDSFTVQYKDRDGQPQVVRVRGEESEVTVGGLEPGRKYKMHLYGLHEGQRVGPVSTVGITAPLPTPLPVEPRLGELAVAAVTSDSVGLSWTVAQGPFDSFLVQYRDAQGQPQAVPVSGDLRAVAVSGLDPARKYKFLLFGLQNGKRHGPVPVEARTAPDTKPSPRLGELTVTDATPDSVGLSWTVPEGEFDSFVVQYKDKDGRLQVVPVAANQREVTVQGLEPSRKYRFLLYGLSGRKRLGPISADSTTAPLEKELPPHLGELTVAEETSSSLRLSWTVAQGPFDSFVVQYRDTDGQPRAVPVAADQRTVTVEDLEPGKKYKFLLYGLLGGKRLGPVSALGMTAPEEDTPAPELAPEAPEPPEEPRLGVLTVTDTTPDSMRLSWSVAQGPFDSFVVQYEDTNGQPQALLVDGDQSKILISGLEPSTPYRFLLYGLHEGKRLGPLSAEGTTGLAPAGQTSEESRPRLSQLSVTDVTTSSLRLNWEAPPGAFDSFLLRFGVPSPSTLEPHPRPLLQRELMVPGTRHSAVLRDLRSGTLYSLTLYGLRGPHKADSIQGTARTLSPVLESPRDLQFSEIRETSAKVNWMPPPSRADSFKVSYQLADGGEPQSVQVDGQARTQKLQGLIPGARYEVTVVSVRGFEESEPLTGFLTTVPDGPTQLRALNLTEGFAVLHWKPPQNPVDTYDVQVTAPGAPPLQAETPGSAVDYPLHDLVLHTNYTATVRGLRGPNLTSPASITFTTGLEAPRDLEAKEVTPRTALLTWTEPPVRPAGYLLSFHTPGGQNQEILLPGGITSHQLLGLFPSTSYNARLQAMWGQSLLPPVSTSFTTGGLRIPFPRDCGEEMQNGAGASRTSTIFLNGNRERPLNVFCDMETDGGGWLVFQRRMDGQTDFWRDWEDYAHGFGNISGEFWLGNEALHSLTQAGDYSMRVDLRAGDEAVFAQYDSFHVDSAAEYYRLHLEGYHGTAGDSMSYHSGSVFSARDRDPNSLLISCAVSYRGAWWYRNCHYANLNGLYGSTVDHQGVSWYHWKGFEFSVPFTEMKLRPRNFRSPAGGG

SEQ ID NO: 112 - protein, 673 aa, Homo sapiens
MRLSWSVAQGPFDSFVVQYEDTNGQPQALLVDGDQSKILISGLEPSTPYRFLLYGLHEGKRLGPLSAEGTTGLAPAGQTSEESRPRLSQLSVTDVTTSSLRLNWEAPPGAFDSFLLRFGVPSPSTLEPHPRPLLQRELMVPGTRHSAVLRDLRSGTLYSLTLYGLRGPHKADSIQGTARTLSPVLESPRDLQFSEIRETSAKVNWMPPPSRADSFKVSYQLADGGEPQSVQVDGQARTQKLQGLIPGARYEVTVVSVRGFEESEPLTGFLTTVPDGPTQLRALNLTEGFAVLHWKPPQNPVDTYDVQVTAPGAPPLQAETPGSAVDYPLHDLVLHTNYTATVRGLRGPNLTSPASITFTTGLEAPRDLEAKEVTPRTALLTWTEPPVRPAGYLLSFHTPGGQNQEILLPGGITSHQLLGLFPSTSYNARLQAMWGQSLLPPVSTSFTTGGLRIPFPRDCGEEMQNGAGASRTSTIFLNGNRERPLNVFCDMETDGGGWLVFQRRMDGQTDFWRDWEDYAHGFGNISGEFWLGNEALHSLTQAGDYSMRVDLRAGDEAVFAQYDSFHVDSAAEYYRLHLEGYHGTAGDSMSYHSGSVFSARDRDPNSLLISCAVSYRGAWWYRNCHYANLNGLYGSTVDHQGVSWYHWKGFEFSVPFTEMKLRPRNFRSPAGGG

SEQ ID NO: 113 - protein, 4245 aa, Homo sapiens
MMPAQYALTSSLVLLVLLSTARAGPFSSRSNVTLPAPRPPPQPGGHTVGAGVGSPSSQLYEHTVEGGEKQVVFTHRINLPPSTGCGCPPGTEPPVLASEVQALRVRLEILEELVKGLKEQCTGGCCPASAQAGTGEQGQTDVRTLCSLHGVFDLSRCTCSCEPGWGGPTCSDPTDAEIPPSSPPSASGSCPDDCNDQGRCVRGRCVCFPGYTGPSCGWPSCPGDCQGRGRCVQGVCVCRAGFSGPDCSQRSCPRGCSQRGRCEGGRCVCDPGYTGDDCGMRSCPRGCSQRGRCENGRCVCNPGYTGEDCGVRSCPRGCSQRGRCKDGRCVCDPGYTGEDCGTRSCPWDCGEGGRCVDGRCVCWPGYTGEDCSTRTCPRDCRGRGRCEDGECICDTGYSGDDCGVRSCPGDCNQRGRCEDGRCVCWPGYTGTDCGSRACPRDCRGRGRCENGVCVCNAGYSGEDCGVRSCPGDCRGRGRCESGRCMCWPGYTGRDCGTRACPGDCRGRGRCVDGRCVCNPGFTGEDCGSRRCPGDCRGHGLCEDGVCVCDAGYSGEDCSTRSCPGGCRGRGQCLDGRCVCEDGYSGEDCGVRQCPNDCSQHGVCQDGVCICWEGYVSEDCSIRTCPSNCHGRGRCEEGRCLCDPGYTGPTCATRMCPADCRGRGRCVQGVCLCHVGYGGEDCGQEEPPASACPGGCGPRELCRAGQCVCVEGFRGPDCAIQTCPGDCRGRGECHDGSCVCKDGYAGEDCGEEVPTIEGMRMHLLEETTVRTEWTPAPGPVDAYEIQFIPTTEGASPPFTARVPSSASAYDQRGLAPGQEYQVTVRALRGTSWGLPASKTITTMIDGPQDLRVVAVTPTTLELGWLRPQAEVDRFVVSYVSAGNQRVRLEVPPEADGTLLTDLMPGVEYVVTVTAERGRAVSYPASVRANTGSSPLGLLGTTDEPPPSGPSTTQGAQAPLLQQRPQELGELRVLGRDETGRLRVVWTAQPDTFAYFQLRMRVPEGPGAHEEVLPGDVRQALVPPPPPGTPYELSLHGVPPGGKPSDPIIYQGIMDKDEEKPGKSSGPPRLGELTVTDRTSDSLLLRWTVPEGEFDSFVIQYKDRDGQPQVVPVEGPQRSAVITSLDPGRKYKFVLYGFVGKKRHGPLVAEAKILPQSDPSPGTPPHLGNLWVTDPTPDSLHLSWTVPEGQFDTFMVQYRDRDGRPQVVPVEGPERSFVVSSLDPDHKYRFTLFGIANKKRYGPLTADGTTAPERKEEPPRPEFLEQPLLGELTVTGVTPDSLRLSWTVAQGPFDSFMVQYKDAQGQPQAVPVAGDENEVTVPGLDPDRKYKMNLYGLRGRQRVGPESVVAKTAPQEDVDETPSPTELGTEAPESPEEPLLGELTVTGSSPDSLSLFWTVPQGSFDSFTVQYKDRDGRPRAVRVGGKESEVTVGGLEPGHKYKMHLYGLHEGQRVGPVSAVGVTAPQQEETPPATESPLEPRLGELTVTDVTPNSVGLSWTVPEGQFDSFIVQYKDKDGQPQVVPVAADQREVTVYNLEPERKYKMNMYGLHDGQRMGPLSVVIVTAPLPPAPATEASKPPLEPRLGELTVTDITPDSVGLSWTVPEGEFDSFVVQYKDRDGQPQVVPVAADQREVTIPDLEPSRKYKFLLFGIQDGKRRSPVSVEAKTVARGDASPGAPPRLGELWVTDPTPDSLRLSWTVPEGQFDSFVVQFKDKDGPQVVPVEGHERSVTVTPLDAGRKYRFLLYGLLGKKRHGPLTADGTTEARSAMDDTGTKRPPKPRLGEELQVTTVTQNSVGLSWTVPEGQFDSFVVQYKDRDGQPQVVPVEGSLREVSVPGLDPAHRYKLLLYGLHHGKRVGPISAVAITAGREETETETTAPTPPAPEPHLGELTVEEATSHTLHLSWMVTEGEFDSFEIQYTDRDGQLQMVRIGGDRNDITLSGLESDHRYLVTLYGFSDGKHVGPVHVEALTVPEEEKPSEPPTATPEPPIKPRLGELTVTDATPDSLSLSWTVPEGQFDHFLVQYRNGDGQPKAVRVPGHEEGVTISGLEPDHKYKMNLYGFHGGQRMGPVSVVGVTAAEEETPSPTEPSMEAPEPAEEPLLGELTVTGSSPDSLSLSWTVPQGRFDSFTVQYKDRDGRPQVVRVGGEESEVTVGGLEPGRKYKMHLYGLHEGRRVGPVSAVGVTAPEEESPDAPLAKLRLGQMTVRDITSDSLSLSWTVPEGQFDHFLVQFKNGDGQPKAVRVPGHEDGVTISGLEPDHKYKMNLYGFHGGQRVGPVSAVGLTAPGKDEEMAPASTEPPTPEPPIKPRLEELTVTDATPDSLSLSWTVPEGQFDHFLVQYKNGDGQPKATRVPGHEDRVTISGLEPDNKYKMNLYGFHGGQRVGPVSAIGVTAAEEETPSPTEPSMEAPEPPEEPLLGELTVTGSSPDSLSLSWTVPQGRFDSFTVQYKDRDGRPQVVRVGGEESEVTVGGLEPGRKYKMHLYGLHEGRRVGPVSTVGVTAPQEDVDETPSPTEPGTEAPGPPEEPLLGELTVTGSSPDSLSLSWTVPQGRFDSFTVQYKDRDGRPQAVRVGGQESKVTVRGLEPGRKYKMHLYGLHEGRRLGPVSAVGVTEDEAETTQAVPTMTPEPPIKPRLGELTMTDATPDSLSLSWTVPEGQFDHFLVQYRNGDGQPKAVRVPGHEDGVTISGLEPDHKYKMNLYGFHGGQRVGPISVIGVTAAEEETPSPTELSTEAPEPPEEPLLGELTVTGSSPDSLSLSWTIPQGHFDSFTVQYKDRDGRPQVMRVRGEESEVTVGGLEPGRKYKMHLYGLHEGRRVGPVSTVGVTEDEAETTQAVPTTTPEPPNKPRLGELTVTDATPDSLSLSWMVPEGQFDHFLVQYRNGDGQPKVVRVPGHEDGVTISGLEPDHKYKMNLYGFHGGQRVGPISVIGVTAAEEETPAPTEPSTEAPEPPEEPLLGELTVTGSSPDSLSLSWTIPQGRFDSFTVQYKDRDGRPQVVRVRGEESEVTVGGLEPGCKYKMHLYGLHEGQRVGPVSAVGVTAPKDEAETTQAVPTMTPEPPIKPRLGELTVTDATPDSLSLSWMVPEGQFDHFLVQYRNGDGQPKAVRVPGHEDGVTISGLEPDHKYKMNLYGFHGGQRVGPVSAIGVTEEETPSPTEPSTEAPEAPEEPLLGELTVTGSSPDSLSLSWTVPQGRFDSFTVQYKDRDGQPQVVRVRGEESEVTVGGLEPGRKYKMHLYGLHEGQRVGPVSTVGITAPLPTPLPVEPRLGELAVAAVTSDSVGLSWTVAQGPFDSFLVQYRDAQGQPQAVPVSGDLRAVAVSGLDPARKYKFLLFGLQNGKRHGPVPVEARTAPDTKPSPRLGELTVTDATPDSVGLSWTVPEGEFDSFVVQYKDKDGRLQVVPVAANQREVTVQGLEPSRKYRFLLYGLSGRKRLGPISADSTTAPLEKELPPHLGELTVAEETSSSLRLSWTVAQGPFDSFVVQYRDTDGQPRAVPVAADQRTVTVEDLEPGKKYKFLLYGLLGGKRLGPVSALGMTAPEEDTPAPELAPEAPEPPEEPRLGVLTVTDTTPDSMRLSWSVAQGPFDSFVVQYEDTNGQPQALLVDGDQSKILISGLEPSTPYRFLLYGLHEGKRLGPLSAEGTTGLAPAGQTSEESRPRLSQLSVTDVTTSSLRLNWEAPPGAFDSFLLRFGVPSPSTLEPHPRPLLQRELMVPGTRHSAVLRDLRSGTLYSLTLYGLRGPHKADSIQGTARTLSPVLESPRDLQFSEIRETSAKVNWMPPPSRADSFKVSYQLADGGEPQSVQVDGQARTQKLQGLIPGARYEVTVVSVRGFEESEPLTGFLTTVPDGPTQLRALNLTEGFAVLHWKPPQNPVDTYDVQVTAPGAPPLQAETPGSAVDYPLHDLVLHTNYTATVRGLRGPNLTSPASITFTTGLEAPRDLEAKEVTPRTALLTWTEPPVRPAGYLLSFHTPGGQNQEILLPGGITSHQLLGLFPSTSYNARLQAMWGQSLLPPVSTSFTTGGLRIPFPRDCGEEMQNGAGASRTSTIFLNGNRERPLNVFCDMETDGGGWLVFQRRMDGQTDFWRDWEDYAHGFGNISGEFWLGNEALHSLTQAGDYSMRVDLRAGDEAVFAQYDSFHVDSAAEYYRLHLEGYHGTAGDSMSYHSGSVFSARDRDPNSLLISCAVSYRGAWWYRNCHYANLNGLYGSTVDHQGVSWYHWKGFEFSVPFTEMKLRPRNFRSPAGGG

SEQ ID NO: 114 - protein, 408 aa, Homo sapiens
MIPGNRMLMVVLLCQVLLGGASHASLIPETGKKKVAEIQGHAGGRRSGQSHELLRDFEATLLQMFGLRRRPQPSKSAVIPDYMRDLYRLQSGEEEEEQIHSTGLEYPERPASRANTVRSFHHEEHLENIPGTSENSAFRFLFNLSSIPENEVISSAELRLFREQVDQGPDWERGFHRINIYEVMKPPAEVVPGHLITRLLDTRLVHHNVTRWETFDVSPAVLRWTREKQPNYGLAIEVTHLHQTRTHQGQHVRISRSLPQGSGNWAQLRPLLVTFGHDGRGHALTRRRRAKRSPKHHSQRARKKNKNCRRHSLYVDFSDVGWNDWIVAPPGYQAFYCHGDCPFPLADHLNSTNHAIVQTLVNSVNSSIPKACCVPTELSAISMLYLDEYDKVVLKNYQEMVVEGCGCR

SEQ ID NO: 115 - protein, 766 aa, Homo sapiens
MKTPWKVLLGLLGAAALVTIITVPVVLLNKGTDDATADSRKTYTLTDYLKNTYRLKLYSLRWISDHEYLYKQENNILVFNAEYGNSSVFLENSTFDEFGHSINDYSISPDGQFILLEYNYVKQWRHSYTASYDIYDLNKRQLITEERIPNNTQWVTWSPVGHKLAYVWNNDIYVKIEPNLPSYRITWTGKEDIIYNGITDWVYEEEVFSAYSALWWSPNGTFLAYAQFNDTEVPLIEYSFYSDESLQYPKTVRVPYPKAGAVNPTVKFFVVNTDSLSSVTNATSIQITAPASMLIGDHYLCDVTWATQERISLQWLRRIQNYSVMDICDYDESSGRWNCLVARQHIEMSTTGWVGRFRPSEPHFTLDGNSFYKIISNEEGYRHICYFQIDKKDCTFITKGTWEVIGIEALTSDYLYYISNEYKGMPGGRNLYKIQLSDYTKVTCLSCELNPERCQYYSVSFSKEAKYYQLRCSGPGLPLYTLHSSVNDKGLRVLEDNSALDKMLQNVQMPSKKLDFIILNETKFWYQMILPPHFDKSKKYPLLLDVYAGPCSQKADTVFRLNWATYLASTENIIVASFDGRGSGYQGDKIMHAINRRLGTFEVEDQIEAARQFSKMGFVDNKRIAIWGWSYGGYVTSMVLGSGSGVFKCGIAVAPVSRWEYYDSVYTERYMGLPTPEDNLDHYRNSTVMSRAENFKQVEYLLIHGTADDNVHFQQSAQISKALVDVGVDFQAMWYTDEDHGIASSTAHQHIYTHMSHFIKQCFSLP

SEQ ID NO: 116 - protein, 596 aa, Homo sapiens
MATENGAVELGIQNPSTDKAPKGPTGERPLAAGKDPGPPDPKKAPDPPTLKKDAKAPASEKGDGTLAQPSTSSQGPKGEGDRGGGPAEGSAGPPAALPQQTATPETSVKKPKAEQGASGSQDPGKPRVGKKAAEGQAAARRGSPAFLHSPSCPAIISSSEKLLAKKPPSEASELTFEGVPMTHSPTDPRPAKAEEGKNILAESQKEVGEKTPGQAGQAKMQGDTSRGIEFQAVPSEKSEVGQALCLTAREEDCFQILDDCPPPPAPFPHRMVELRTGNVSSEFSMNSKEALGGGKFGAVCTCMEKATGLKLAAKVIKKQTPKDKEMVLLEIEVMNQLNHRNLIQLYAAIETPHEIVLFMEYIEGGELFERIVDEDYHLTEVDTMVFVRQICDGILFMHKMRVLHLDLKPENILCVNTTGHLVKIIDFGLARRYNPNEKLKVNFGTPEFLSPEVVNYDQISDKTDMWSMGVITYMLLSGLSPFLGDDDTETLNNVLSGNWYFDEETFEAVSDEAKDFVSNLIVKDQRARMNAAQCLAHPWLNNLAEKAKRCNRRLKSQILLKKYLMKRRWKKNFIAVSAANRFKKISSSGALMALGV

SEQ ID NO: 117 - protein, 388 aa, Homo sapiens
MLKVKRLEEFNTCYNSNQLEKMAFFQCREEVEKVKCFLEKNSGDQDSRSGHNEAKEVWSNADLTERMPVKSKRTSALAVDIPAPPAPFDHRIVTAKQGAVNSFYTVSKTEILGGGRFGQVHKCEETATGLKLAAKIIKTRGMKDKEEVKNEISVMNQLDHANLIQLYDAFESKNDIVLVMEYVDGGELFDRIIDESYNLTELDTILFMKQICEGIRHMHQMYILHLDLKPENILCVNRDAKQIKIIDFGLARRYKPREKLKVNFGTPEFLAPEVVNYDFVSFPTDMWSVGVIAYMLLSGLSPFLGDNDAETLNNILACRWDLEDEEFQDISEEAKEFISKLLIKEKSWRISASEALKHPWLSDHKLHSRLNAQKKKNRGSDAQDFVTK

SEQ ID NO: 118 - protein, 388 aa, Homo sapiens
MLKVKRLEEFNTCYNSNQLEKMAFFQCREEVEKVKCFLEKNSGDQDSRSGHNEAKEVWSNADLTERMPVKSKRTSALAVDIPAPPAPFDHRIVTAKQGAVNSFYTVSKTEILGGGRFGQVHKCEETATGLKLAAKIIKTRGMKDKEEVKNEISVMNQLDHANLIQLYDAFESKNDIVLVMEYVDGGELFDRIIDESYNLTELDTILFMKQICEGIRHMHQMYILHLDLKPENIQCSRFLIDTSILPLCLLNCRYKPREKLKVNFGTPEFLAPEVVNYDFVSFPTDMWSVGVIAYMLLSGLSPFLGDNDAETLNNILACRWDLEDEEFQDISEEAKEFISKLLIKEKSWRISASEALKHPWLSDHKLHSRLNAQKKKNRGSDAQDFVTK

SEQ ID NO: 119 - protein, 477 aa, Homo sapiens
MGAGVLVLGASEPGNLSSAAPLPDGAATAARLLVPASPPASLLPPASESPEPLSQQWTAGMGLLMALIVLLIVAGNVLVIVAIAKTPRLQTLTNLFIMSLASADLVMGLLVVPFGATIVVWGRWEYGSFFCELWTSVDVLCVTASIETLCVIALDRYLAITSPFRYQSLLTRARARGLVCTVWAISALVSFLPILMHWWRAESDEARRCYNDPKCCDFVTNRAYAIASSVVSFYVPLCIMAFVYLRVFREAQKQVKKIDSCERRFLGGPARPPSPSPSPVPAPAPPPGPPRPAAAAATAPLANGRAGKRRPSRLVALREQKALKTLGIIMGVFTLCWLPFFLANVVKAFHRELVPDRLFVFFNWLGYANSAFNPIIYCRSPDFRKAFQRLLCCARRAARRRHATHGDRPRASGCLARPGPPPSPGAASDDDDDDVVGATPPARLLEPWAGCNGGAAADSDSSLDEPCRPGFASESKV

SEQ ID NO: 120 - protein, 518 aa, Homo sapiens
MTSSKIEMPGEVKADPAALMASLHLLPSPTPNLEIKYTKIFINNEWQNSESGRVFPVYNPATGEQVCEVQEADKADIDKAVQAARLAFSLGSVWRRMDASERGRLLDKLADLVERDRAVLATMESLNGGKPFLQAFYVDLQGVIKTFRYYAGWADKIHGMTIPVDGDYFTFTRHEPIGVCGQIIPWNFPLLMFAWKIAPALCCGNTVVIKPAEQTPLSALYMGALIKEAGFPPGVINILPGYGPTAGAAIASHIGIDKIAFTGSTEVGKLIQEAAGRSNLKRVTLELGGKSPNIIFADADLDYAVEQAHQGVFFNQGQCCTAGSRIFVEESIYEEFVRRSVERAKRRVVGSPFDPTTEQGPQIDKKQYNKILELIQSGVAEGAKLECGGKGLGRKGFFIEPTVFSNVTDDMRIAKEEIFGPVQEILRFKTMDEVIERANNSDFGLVAAVFTNDINKALTVSSAMQAGTVWINCYNALNAQSPFGGFKMSGNGREMGEFGLREYSEVKTVTVKIPQKNS

SEQ ID NO: 121 - protein, 480 aa, Homo sapiens
MTSSKIEMPGEVKADPAALMASLHLLPSPTPNLEIKYTKIFINNEWQNSESGRVFPVYNPATGEQVCEVQEADKADIDKAVQAARLAFSLGSVWRRMDASERGRLLDKLADLVERDRAVLATMESLNGGKPFLQAFYVDLQGVIKTFRYYAGWADKIHGMTIPVDGDYFTFTRHEPIGVCGQIIPWNFPLLMFAWKIAPALCCGNTVVIKPAEQTPLSALYMGALIKEVGKLIQEAAGRSNLKRVTLELGGKSPNIIFADADLDYAVEQAHQGVFFNQGQCCTAGSRIFVEESIYEEFVRRSVERAKRRVVGSPFDPTTEQGPQIDKKQYNKILELIQSGVAEGAKLECGGKGLGRKGFFIEPTVFSNVTDDMRIAKEEIFGPVQEILRFKTMDEVIERANNSDFGLVAAVFTNDINKALTVSSAMQAGTVWINCYNALNAQSPFGGFKMSGNGREMGEFGLREYSEVKTVTVKIPQKNS

SEQ ID NO: 122 - protein, 497 aa, Homo sapiens
MKNQCETVWLKSPIKLKLIFINNEWQNSESGRVFPVYNPATGEQVCEVQEADKADIDKAVQAARLAFSLGSVWRRMDASERGRLLDKLADLVERDRAVLATMESLNGGKPFLQAFYVDLQGVIKTFRYYAGWADKIHGMTIPVDGDYFTFTRHEPIGVCGQIIPWNFPLLMFAWKIAPALCCGNTVVIKPAEQTPLSALYMGALIKEAGFPPGVINILPGYGPTAGAAIASHIGIDKIAFTGSTEVGKLIQEAAGRSNLKRVTLELGGKSPNIIFADADLDYAVEQAHQGVFFNQGQCCTAGSRIFVEESIYEEFVRRSVERAKRRVVGSPFDPTTEQGPQIDKKQYNKILELIQSGVAEGAKLECGGKGLGRKGFFIEPTVFSNVTDDMRIAKEEIFGPVQEILRFKTMDEVIERANNSDFGLVAAVFTNDINKALTVSSAMQAGTVWINCYNALNAQSPFGGFKMSGNGREMGEFGLREYSEVKTVTVKIPQKNS

SEQ ID NO: 123 - protein, 422 aa, Homo sapiens
MDASERGRLLDKLADLVERDRAVLATMESLNGGKPFLQAFYVDLQGVIKTFRYYAGWADKIHGMTIPVDGDYFTFTRHEPIGVCGQIIPWNFPLLMFAWKIAPALCCGNTVVIKPAEQTPLSALYMGALIKEAGFPPGVINILPGYGPTAGAAIASHIGIDKIAFTGSTEVGKLIQEAAGRSNLKRVTLELGGKSPNIIFADADLDYAVEQAHQGVFFNQGQCCTAGSRIFVEESIYEEFVRRSVERAKRRVVGSPFDPTTEQGPQIDKKQYNKILELIQSGVAEGAKLECGGKGLGRKGFFIEPTVFSNVTDDMRIAKEEIFGPVQEILRFKTMDEVIERANNSDFGLVAAVFTNDINKALTVSSAMQAGTVWINCYNALNAQSPFGGFKMSGNGREMGEFGLREYSEVKTVTVKIPQKNS

SEQ ID NO: 124 - protein, 614 aa, Homo sapiens
MMRQATMDFSTPSVFDQQRGDSSEEVDLTMVYQAASNGDVNALTAVIREDPSILECCDSEGCTPLMHAVSGRQADTVKLLLKMGANINMQDAYGRTSLCLATYLGWLEGCVSLLRNGAKHNIPDKNGRLPLHAATAEPDMRLLTVLLQQSNISEINHQDNEGMTPLHWAAFHNQPQHTQMLLKKGADPTLVDKDFKTALHWAVQSGNRILCSIILSHHQGPSIINYDDESGKTCVHIAAAAGFSDIIHELARVPECNLQALDVDDRTPLHWAAAAGKAECVQSLLELGMDSNLRDINESTPLAYALYCGHTACVKLLSQESRTEPTRPPPSQSSRPQKKERRFNVLNQIFCKNKKEEQRAHQKDPSRDRYREEDTSEVNDIITTFDSIVGTNCQEQPGDQVAMVEFKKKTSDNSKYLLPEKKPLARKGLPPIRTQSLPPITLGNNFLTASHRATSHAGLSSAPHHMAQRSQKSRSEQDLLNNRTGCQMLLDNPWKSDSNQVFSYKVWTVSSSDKLLDRLLSVRPGHQEVSVPPHLRHLHNPSSGQNFQHLSPNRHKIRDLPFTRNNLAPLPDQKFLSGEPLRTNRVLPAIPSQRRHSTAAEESEHSANPTSDEN

SEQ ID NO: 125 - protein, 326 aa, Homo sapiens
MDSNLRDINESTPLAYALYCGHTACVKLLSQESRTEPTRPPPSQSSRPQKKERRFNVLNQIFCKNKKEEQRAHQKDPSRDRYREEDTSEVNDIITTFDSIVGTNCQEQPGDQVAMVEFKKKTSDNSKYLLPEKKPLARKGLPPIRTQSLPPITLGNNFLTASHRATSHAGLSSAPHHMAQRSQKSRSEQDLLNNRTGCQMLLDNPWKSDSNQVFSYKVWTVSSSDKLLDRLLSVRPGHQEVSVPPHLRHLHNPSSGQNFQHLSPNRHKIRDLPFTRNNLAPLPDQKFLSGEPLRTNRVLPAIPSQRRHSTAAEESEHSANPTSDEN

SEQ ID NO: 126 - protein, 295 aa, Homo sapiens
MLRTEPTRPPPSQSSRPQKKERRFNVLNQIFCKNKKEEQRAHQKDPSRDRYREEDTSEVNDIITTFDSIVGTNCQEQPGDQVAMVEFKKKTSDNSKYLLPEKKPLARKGLPPIRTQSLPPITLGNNFLTASHRATSHAGLSSAPHHMAQRSQKSRSEQDLLNNRTGCQMLLDNPWKSDSNQVFSYKVWTVSSSDKLLDRLLSVRPGHQEVSVPPHLRHLHNPSSGQNFQHLSPNRHKIRDLPFTRNNLAPLPDQKFLSGEPLRTNRVLPAIPSQRRHSTAAEESEHSANPTSDEN

SEQ ID NO: 127 - protein, 449 aa, Homo sapiens
MMKTLLLFVGLLLTWESGQVLGDQTVSDNELQEMSNQGSKYVNKEIQNAVNGVKQIKTLIEKTNEERKTLLSNLEEAKKKKEDALNETRESETKLKELPGVCNETMMALWEECKPCLKQTCMKFYARVCRSGSGLVGRQLEEFLNQSSPFYFWMNGDRIDSLLENDRQQTHMLDVMQDHFSRASSIIDELFQDRFFTREPQDTYHYLPFSLPHRRPHFFFPKSRIVRSLMPFSPYEPLNFHAMFQPFLEMIHEAQQAMDIHFHSPAFQHPPTEFIREGDDDRTVCREIRHNSTGCLRMKDQCDKCREILSVDCSTNNPSQAKLRRELDESLQVAERLTRKYNELLKSYQWKMLNTSSLLEQLNEQFNWVSRLANLTQGEDQYYLRVTTVASHTSDSDVPSGVTEVVVKLFDSDPITVTVPVEVSRKNPKFMETVAEKALQEYRKKHREE

SEQ ID NO: 128 - protein, 501 aa, Homo sapiens
MQVCSQPQRGCVREQSAINTAPPSAHNAASPGGARGHRVPLTEACKDSRIGGMMKTLLLFVGLLLTWESGQVLGDQTVSDNELQEMSNQGSKYVNKEIQNAVNGVKQIKTLIEKTNEERKTLLSNLEEAKKKKEDALNETRESETKLKELPGVCNETMMALWEECKPCLKQTCMKFYARVCRSGSGLVGRQLEEFLNQSSPFYFWMNGDRIDSLLENDRQQTHMLDVMQDHFSRASSIIDELFQDRFFTREPQDTYHYLPFSLPHRRPHFFFPKSRIVRSLMPFSPYEPLNFHAMFQPFLEMIHEAQQAMDIHFHSPAFQHPPTEFIREGDDDRTVCREIRHNSTGCLRMKDQCDKCREILSVDCSTNNPSQAKLRRELDESLQVAERLTRKYNELLKSYQWKMLNTSSLLEQLNEQFNWVSRLANLTQGEDQYYLRVTTVASHTSDSDVPSGVTEVVVKLFDSDPITVTVPVEVSRKNPKFMETVAEKALQEYRKKHREE

SEQ ID NO: 129 - protein, 274 aa, Homo sapiens
MQDHFSRASSIIDELFQDRFFTREPQDTYHYLPFSLPHRRPHFFFPKSRIVRSLMPFSPYEPLNFHAMFQPFLEMIHEAQQAMDIHFHSPAFQHPPTEFIREGDDDRTVCREIRHNSTGCLRMKDQCDKCREILSVDCSTNNPSQAKLRRELDESLQVAERLTRKYNELLKSYQWKMLNTSSLLEQLNEQFNWVSRLANLTQGEDQYYLRVTTVASHTSDSDVPSGVTEVVVKLFDSDPITVTVPVEVSRKNPKFMETVAEKALQEYRKKHREE

SEQ ID NO: 130 - protein, 416 aa, Homo sapiens
MSNQGSKYVNKEIQNAVNGVKQIKTLIEKTNEERKTLLSNLEEAKKKKEDALNETRESETKLKELPGVCNETMMALWEECKPCLKQTCMKFYARVCRSGSGLVGRQLEEFLNQSSPFYFWMNGDRIDSLLENDRQQTHMLDVMQDHFSRASSIIDELFQDRFFTREPQDTYHYLPFSLPHRRPHFFFPKSRIVRSLMPFSPYEPLNFHAMFQPFLEMIHEAQQAMDIHFHSPAFQHPPTEFIREGDDDRTVCREIRHNSTGCLRMKDQCDKCREILSVDCSTNNPSQAKLRRELDESLQVAERLTRKYNELLKSYQWKMLNTSSLLEQLNEQFNWVSRLANLTQGEDQYYLRVTTVASHTSDSDVPSGVTEVVVKLFDSDPITVTVPVEVSRKNPKFMETVAEKALQEYRKKHREE

SEQ ID NO: 131 - protein, 460 aa, Homo sapiens
MEACKDSRIGGMMKTLLLFVGLLLTWESGQVLGDQTVSDNELQEMSNQGSKYVNKEIQNAVNGVKQIKTLIEKTNEERKTLLSNLEEAKKKKEDALNETRESETKLKELPGVCNETMMALWEECKPCLKQTCMKFYARVCRSGSGLVGRQLEEFLNQSSPFYFWMNGDRIDSLLENDRQQTHMLDVMQDHFSRASSIIDELFQDRFFTREPQDTYHYLPFSLPHRRPHFFFPKSRIVRSLMPFSPYEPLNFHAMFQPFLEMIHEAQQAMDIHFHSPAFQHPPTEFIREGDDDRTVCREIRHNSTGCLRMKDQCDKCREILSVDCSTNNPSQAKLRRELDESLQVAERLTRKYNELLKSYQWKMLNTSSLLEQLNEQFNWVSRLANLTQGEDQYYLRVTTVASHTSDSDVPSGVTEVVVKLFDSDPITVTVPVEVSRKNPKFMETVAEKALQEYRKKHREE

SEQ ID NO: 132 - protein, 429 aa, Homo sapiens
MGDQTVSDNELQEMSNQGSKYVNKEIQNAVNGVKQIKTLIEKTNEERKTLLSNLEEAKKKKEDALNETRESETKLKELPGVCNETMMALWEECKPCLKQTCMKFYARVCRSGSGLVGRQLEEFLNQSSPFYFWMNGDRIDSLLENDRQQTHMLDVMQDHFSRASSIIDELFQDRFFTREPQDTYHYLPFSLPHRRPHFFFPKSRIVRSLMPFSPYEPLNFHAMFQPFLEMIHEAQQAMDIHFHSPAFQHPPTEFIREGDDDRTVCREIRHNSTGCLRMKDQCDKCREILSVDCSTNNPSQAKLRRELDESLQVAERLTRKYNELLKSYQWKMLNTSSLLEQLNEQFNWVSRLANLTQGEDQYYLRVTTVASHTSDSDVPSGVTEVVVKLFDSDPITVTVPVEVSRKNPKFMETVAEKALQEYRKKHREE

SEQ ID NO: 133 - protein, 276 aa, Homo sapiens
MDGPAIITQVTNPKEDEGRLPGAGEKASQCNVSLKKQRSRSILSSFFCCFRDYNVEAPPPSSPSVLPPLVEENGGLQKGDQRQVIPIPSPPAKYLLPEVTVLDYGKKCVVIDLDETLVHSSFKPISNADFIVPVEIDGTIHQVYVLKRPHVDEFLQRMGQLFECVLFTASLAKYADPVADLLDRWGVFRARLFRESCVFHRGNYVKDLSRLGRELSKVIIVDNSPASYIFHPENAVPVQSWFDDMTDTELLDLIPFFEGLSREDDVYSMLHRLCNR

SEQ ID NO: 134 - protein, 265 aa, Homo sapiens
MDGPAIITQVTNPKEDEGRLPGAGEKASQCNVSLKKQRSRSILSSFFCCFRDYNVEAPPPSSPSVLPPLVEENGGLQKPPAKYLLPEVTVLDYGKKCVVIDLDETLVHSSFKPISNADFIVPVEIDGTIHQVYVLKRPHVDEFLQRMGQLFECVLFTASLAKYADPVADLLDRWGVFRARLFRESCVFHRGNYVKDLSRLGRELSKVIIVDNSPASYIFHPENAVPVQSWFDDMTDTELLDLIPFFEGLSREDDVYSMLHRLCNR

SEQ ID NO: 135 - protein, 734 aa, Homo sapiens
MAASPGPAGVGGAGAVYGSGSSGFALDSGLEIKTRSVEQTLLPLVSQITTLINHKDNTKKSDKTLQAIQRVGQAVNLAVGRFVKVGEAIANENWDLKEEINIACIEAKQAGETIAALTDITNLNHLESDGQITIFTDKTGVIKAARLLLSSVTKVLLLADRVVIKQIITSRNKVLATMERLEKVNSFQEFVQIFSQFGNEMVEFAHLSGDRQNDLKDEKKKAKMAAARAVLEKCTMMLLTASKTCLRHPNCESAHKNKEGVFDRMKVALDKVIEIVTDCKPNGETDISSISIFTGIKEFKMNIEALRENLYFQSKENLSVTLEVILERMEDFTDSAYTSHEHRERILELSTQARMELQQLISVWIQAQSKKTKSIAEELELSILKISHSLNELKKELHSTATQLAADLLKYHADHVVLKALKLTGVEGNLEALAEYACKLSEQKEQLVETCRLLRHISGTEPLEITCIHAEETFQVTGQQIISAAETLTLHPSSKIAKENLDVFCEAWESQISDMSTLLREINDVFEGRRGEKYGYLSLPKPMKNNANLKSLKPDKPDSEEQAKIAKLGLKLGLLTSDADCEIEKWEDQENEIVQYGRNMSSMAYSLYLFTRGEGPLKTSQDLIHQLEVFAAEGLKLTSSVQAFSKQLKDDDKLMLLLEINKLIPLCHQLQTVTKTSLQNKVFLKVDKCITKTRSMMALLVQLLSLCYKLLKKLQMENNGWVSVTNKDTMDSKT

SEQ ID NO: 136 - protein, 718 aa, Homo sapiens
MAASPGPAGVGGAGAVYGSGSSGFALDSGLEIKTRSVEQTLLPLVSQITTLINHKDNTKKSDKTLQAIQRVGQAVNLAVGRFVKVGEAIANENWDLKEEINIACIEAKQAGETIAALTDITNLNHLESDGQITIFTDKTGVIKAARLLLSSVTKVLLLADRVVIKQIITSRNKVLATMERLEKVNSFQEFVQIFSQFGNEMVEFAHLSGDRQNDLKDEKKKAKMAAARAVLEKCTMMLLTASKTCLRHPNCESAHKNKEGVFDRMKVALDKVIEIVTDCKPNGETDISSISIFTGIKEFKMNIEALRENLYFQSKENLSVTLEVILERMEDFTDSAYTSHEHRERILELSTQARMELQQLISVWIQAQSKKTKSIAEELELSILKISHSLNELKKELHSTATQLAADLLKYHADHVVLKALKLTGVEGNLEALAEYACKLSEQKEQLVETCRLLRHISGTEPLEITCIHAEETFQVTGQQIISAAETLTLHPSSKIAKENLDVFCEAWESQISDMSTLLREINDVFEGRRGEKYGYLSLPKPMKNNANLKSLKPDKPDSEEQAKIAKLGLKLGLLTSDADCEIEKWEDQENEIVQYGRNMSSMAYSLYLFTRGEGPLKTSQDLIHQLEVFAAEGLKLTSSVQAFSKQLKDDDKLMLLLEINKLIPLCHQLQTVTKTSLQNKVFLKVDKCITKTRSMMALLVQLLSLCYKLLKKSETRY

SEQ ID NO: 137 - protein, 650 aa, Homo sapiens
MAASPGPAGVGGAGAVYGSGSSGFALDSGLEIKTRSVEQTLLPLVSQITTLINHKDNTKKSDKTLQAIQRVGQAVNLAVGRFVKVGEAIANENWDLKEEINIACIEAKQAGETIAALTDITNLNHLESDGQITIFTDKTGVIKAARLLLSSVTKVLLLADRVVIKQIITSRNKVLATMERLEKVNSFQEFVQIFSQFGNEMVEFAHLSGDRQNDLKDEKKKAKMAAARAVLEKCTMMLLTASKTCLRHPNCESAHKNKEGVFDRMKVALDKVIEIVTDCKPNGETDISSISIFTGIKEFKMNIEALRENLYFQSKENLSVTLEVILERMEDFTDSAYTSHEHRERILELSTQARMELQQLISVWIQAQSKKTKSIAEELELSILKISHSLNELKKEIISAAETLTLHPSSKIAKENLDVFCEAWESQISDMSTLLREINDVFEGRRGEKYGYLSLPKPMKNNANLKSLKPDKPDSEEQAKIAKLGLKLGLLTSDADCEIEKWEDQENEIVQYGRNMSSMAYSLYLFTRGEGPLKTSQDLIHQLEVFAAEGLKLTSSVQAFSKQLKDDDKLMLLLEINKLIPLCHQLQTVTKTSLQNKVFLKVDKCITKTRSMMALLVQLLSLCYKLLKKLQMENNGWVSVTNKDTMDSKT

SEQ ID NO: 138 - protein, 187 aa, Homo sapiens
MVGSLNCIVAVSQNMGIGKNGDLPWPPLRNEFRYFQRMTTTSSVEGKQNLVIMGKKTWFSIPEKNRPLKGRINLVLSRELKEPPQGAHFLSRSLDDALKLTEQPELANKVDMVWIVGGSSVYKEAMNHPGHLKLFVTRIMQDFESDTFFPEIDLEKYKLLPEYPGVLSDVQEEKGIKYKFEVYEKND

SEQ ID NO: 139 - protein, 135 aa, Homo sapiens
MGKKTWFSIPEKNRPLKGRINLVLSRELKEPPQGAHFLSRSLDDALKLTEQPELANKVDMVWIVGGSSVYKEAMNHPGHLKLFVTRIMQDFESDTFFPEIDLEKYKLLPEYPGVLSDVQEEKGIKYKFEVYEKND

SEQ ID NO: 140 - protein, 337 aa, Homo sapiens
MGKDYYCILGIEKGASDEDIKKAYRKQALKFHPDKNKSPQAEEKFKEVAEAYEVLSDPKKREIYDQFGEEGLKGGAGGTDGQGGTFRYTFHGDPHATFAAFFGGSNPFEIFFGRRMGGGRDSEEMEIDGDPFSAFGFSMNGYPRDRNSVGPSRLKQDPPVIHELRVSLEEIYSGCTKRMKISRKRLNADGRSYRSEDKILTIEIKKGWKEGTKITFPREGDETPNSIPADIVFIIKDKDHPKFKRDGSNIIYTAKISLREALCGCSINVPTLDGRNIPMSVNDIVKPGMRRRIIGYGLPFPKNPDQRGDLLIEFEVSFPDTISSSSKEVLRKHLPAS

SEQ ID NO: 141 - protein, 1025 aa, Homo sapiens
MAPVLSKDSADIESILALNPRTQTHATLCSTSAKKLDKKHWKRNPDKNCFNCEKLENNFDDIKHTTLGERGALREAMRCLKCADAPCQKSCPTNLDIKSFITSIANKNYYGAAKMIFSDNPLGLTCGMVCPTSDLCVGGCNLYATEEGPINIGGLQQFATEVFKAMSIPQIRNPSLPPPEKMSEAYSAKIALFGAGPASISCASFLARLGYSDITIFEKQEYVGGLSTSEIPQFRLPYDVVNFEIELMKDLGVKIICGKSLSVNEMTLSTLKEKGYKAAFIGIGLPEPNKDAIFQGLTQDQGFYTSKDFLPLVAKGSKAGMCACHSPLPSIRGVVIVLGAGDTAFDCATSALRCGARRVFIVFRKGFVNIRAVPEEMELAKEEKCEFLPFLSPRKVIVKGGRIVAMQFVRTEQDETGKWNEDEDQMVHLKADVVISAFGSVLSDPKVKEALSPIKFNRWGLPEVDPETMQTSEAWVFAGGDVVGLANTTVESVNDGKQASWYIHKYVQSQYGASVSAKPELPLFYTPIDLVDISVEMAGLKFINPFGLASATPATSTSMIRRAFEAGWGFALTKTFSLDKDIVTNVSPRIIRGTTSGPMYGPGQSSFLNIELISEKTAAYWCQSVTELKADFPDNIVIASIMCSYNKNDWTELAKKSEDSGADALELNLSCPHGMGERGMGLACGQDPELVRNICRWVRQAVQIPFFAKLTPNVTDIVSIARAAKEGGANGVTATNTVSGLMGLKSDGTPWPAVGIAKRTTYGGVSGTAIRPIALRAVTSIARALPGFPILATGGIDSAESGLQFLHSGASVLQVCSAIQNQDFTVIEDYCTGLKALLYLKSIEELQDWDGQSPATVSHQKGKPVPRIAELMDKKLPSFGPYLEQRKKIIAENKIRLKEQNVAFSPLKRNCFIPKRPIPTIKDVIGKALQYLGTFGELSNVEQVVAMIDEEMCINCGKCYMTCNDSGYQAIQFDPETHLPTITDTCTGCTLCLSVCPIVDCIKMVSRTTPYEPKRGVPLSVNPVC

SEQ ID NO: 142 - protein, 173 aa, Homo sapiens
MAPVLSKDSADIESILALNPRTQTHATLCSTSAKKLDKKHWKRNPDKNCFNCEKLENNFDDIKHTTLGERGALREAMRCLKCADAPCQKSCPTNLDIKSFITSIANKNYYGAAKMIFSDNPLGLTCGMVCPTSDLCVGGCNLYATEEGPINIGGLQQFATETLILAFSLMNHL

SEQ ID NO: 143 - protein, 581 aa, Homo sapiens
MQRPGPRLWLVLQVMGSCAAISSMDMERPGDGKCQPIEIPMCKDIGYNMTRMPNLMGHENQREAAIQLHEFAPLVEYGCHGHLRFFLCSLYAPMCTEQVSTPIPACRVMCEQARLKCSPIMEQFNFKWPDSLDCRKLPNKNDPNYLCMEAPNNGSDEPTRGSGLFPPLFRPQRPHSAQEHPLKDGGPGRGGCDNPGKFHHVEKSASCAPLCTPGVDVYWSREDKRFAVVWLAIWAVLCFFSSAFTVLTFLIDPARFRYPERPIIFLSMCYCVYSVGYLIRLFAGAESIACDRDSGQLYVIQEGLESTGCTLVFLVLYYFGMASSLWWVVLTLTWFLAAGKKWGHEAIEANSSYFHLAAWAIPAVKTILILVMRRVAGDELTGVCYVGSMDVNALTGFVLIPLACYLVIGTSFILSGFVALFHIRRVMKTGGENTDKLEKLMVRIGLFSVLYTVPATCVIACYFYERLNMDYWKILAAQHKCKMNNQTKTLDCLMAASIPAVEIFMVKIFMLLVVGITSGMWIWTSKTLQSWQQVCSRRLKKKSRRKPASVITSGGIYKKAQHPQKTHHGKYEIPAQSPTCV

SEQ ID NO: 144 - protein, 694 aa, Homo sapiens
MSGGEVVCSGWLRKSPPEKKLKRYAWKRRWFVLRSGRLTGDPDVLEYYKNDHAKKPIRIIDLNLCQQVDAGLTFNKKEFENSYIFDINTIDRIFYLVADSEEEMNKWVRCICDICGFNPTEEDPVKPPGSSLQAPADLPLAINTAPPSTQADSSSATLPPPYQLINVPPHLETLGIQEDPQDYLLLINCQSKKPEPTRTHADSAKSTSSETDCNDNVPSHKNPASSQSKHGMNGFFQQQMIYDSPPSRAPSASVDSSLYNLPRSYSHDVLPKVSPSSTEADGELYVFNTPSGTSSVETQMRHVSISYDIPPTPGNTYQIPRTFPEGTLGQTSKLDTIPDIPPPRPPKPHPAHDRSPVETCSIPRTASDTDSSYCIPTAGMSPSRSNTISTVDLNKLRKDASSQDCYDIPRAFPSDRSSSLEGFHNHFKVKNVLTVGSVSSEELDENYVPMNPNSPPRQHSSSFTEPIQEANYVPMTPGTFDFSSFGMQVPPPAHMGFRSSPKTPPRRPVPVADCEPPPVDRNLKPDRKVKPAPLEIKPLPEWEELQAPVRSPITRSFARDSSRFPMSPRPDSVHSTTSSSDSHDSEENYVPMNPNLSSEDPNLFGSNSLDGGSSPMIKPKGDKQVEYLDLDLDSGKSTPPRKQKSSGSGSSVADERVDYVVVDQQKTLALKSTREAWTDGRQSTESETPAKSVK

SEQ ID NO: 145 - protein, 724 aa, Homo sapiens
MSGGEVVCSGWLRKSPPEKKLKRYAWKRRWFVLRSGRLTGDPDVLEYYKNDHAKKPIRIIDLNLCQQVDAGLTFNKKEFENSYIFDINTIDRIFYLVADSEEEMNKWVRCICDICGFNPTEEDPVKPPGSSLQAPADLPLAINTAPPSTQADSSSATLPPPYQLINVPPHLETLGIQEDPQDYLLLINCQSKKPEPTRTHADSAKSTSSETDCNDNVPSHKNPASSQSKHGMNGFFQQQMIYDSPPSRAPSASVDSSLYNLPRSYSHDVLPKVSPSSTEADGELYVFNTPSGTSSVETQMRHVSISYDIPPTPGNTYQIPRTFPEGTLGQTSKLDTIPDIPPPRPPKPHPAHDRSPVETCSIPRTASDTDSSYCIPTAGMSPSRSNTISTVDLNKLRKDASSQDCYDIPRAFPSDRSSSLEGFHNHFKVKNVLTVGSVSSEELDENYVPMNPNSPPRQHSSSFTEPIQEANYVPMTPGTFDFSSFGMQVPPPAHMGFRSSPKTPPRRPVPVADCEPPPVDRNLKPDRKGQSPKILRLKPHGLERTDSQTIGDFATRRKVKPAPLEIKPLPEWEELQAPVRSPITRSFARDSSRFPMSPRPDSVHSTTSSSDSHDSEENYVPMNPNLSSEDPNLFGSNSLDGGSSPMIKPKGDKQVEYLDLDLDSGKSTPPRKQKSSGSGSSVADERVDYVVVDQQKTLALKSTREAWTDGRQSTESETPAKSVK

SEQ ID NO: 146 - protein, 425 aa, Homo sapiens
MEPSATPGAQMGVPPGSREPSPVPPDYEDEFLRYLWRDYLYPKQYEWVLIAAYVAVFVVALVGNTLVCLAVWRNHHMRTVTNYFIVNLSLADVLVTAICLPASLLVDITESWLFGHALCKVIPYLQAVSVSVAVLTLSFIALDRWYAICHPLLFKSTARRARGSILGIWAVSLAIMVPQAAVMECSSVLPELANRTRLFSVCDERWADDLYPKIYHSCFFIVTYLAPLGLMAMAYFQIFRKLWGRQIPGTTSALVRNWKRPSDQLGDLEQGLSGEPQPRARAFLAEVKQMRARRKTAKMLMVVLLVFALCYLPISVLNVLKRVFGMFRQASDREAVYACFTFSHWLVYANSAANPIIYNFLSGKFREQFKAAFSCCLPGLGPCGSLKAPSPRSSASHKSLSLQSRCSISKISEHVVLTSVTTVLP

SEQ ID NO: 147 - protein, 177 aa, Homo sapiens
MFHVSFRYIFGLPPLILVLLPVASSDCDIEGKDGKQYESVLMVSIDQLLDSMKEIGSNCLNNEFNFFKRHICDANKEGMFLFRAARKLRQFLKMNSTGDFDLHLLKVSEGTTILLNCTGQVKGRKPAALGEAQPTKSLEENKSLKEQKKLNDLCFLKRLLQEIKTCWNKILMGTKEH

SEQ ID NO: 148 - protein, 133 aa, Homo sapiens
MFHVSFRYIFGLPPLILVLLPVASSDCDIEGKDGKQYESVLMVSIDQLLDSMKEIGSNCLNNEFNFFKRHICDANKVKGRKPAALGEAQPTKSLEENKSLKEQKKLNDLCFLKRLLQEIKTCWNKILMGTKEH

SEQ ID NO: 149 - protein, 64 aa, Homo sapiens
MKEIGSNCLNNEFNFFKRHICDANKEENKSLKEQKKLNDLCFLKRLLQEIKTCWNKILMGTKEH

SEQ ID NO: 150 - protein, 524 aa, Homo sapiens
MFHCIPLWRCNRHVESIDKRHCSLVYVPEEIYRYARSLEELLLDANQLRELPEQFFQLVKLRKLGLSDNEIQRLPPEIANFMQLVELDVSRNEIPEIPESISFCKALQVADFSGNPLTRLPESFPELQNLTCLSVNDISLQSLPENIGNLYNLASLELRENLLTYLPDSLTQLRRLEELDLGNNEIYNLPESIGALLHLKDLWLDGNQLSELPQEIGNLKNLLCLDVSENRLERLPEEISGLTSLTDLVISQNLLETIPDGIGKLKKLSILKVDQNRLTQLPEAVGECESLTELVLTENQLLTLPKSIGKLKKLSNLNADRNKLVSLPKEIGGCCSLTVFCVRDNRLTRIPAEVSQATELHVLDVAGNRLLHLPLSLTALKLKALWLSDNQSQPLLTFQTDTDYTTGEKILTCVLLPQLPSEPTCQENLPRCGALENLVNDVSDEAWNERAVNRVSAIRFVEDEKDEEDNETRTLLRRATPHPGELKHMKKTVENLRNDMNAAKGLDSNKNEVNHAIDRVTTSV

SEQ ID NO: 151 - protein, 197 aa, Homo sapiens
MFHCIPLWRCNRHVESIDKRHCSLVYVPEEIYRYARSLEELLLDANQLRELPEQFFQLVKLRKLGLSDNEIQRLPPEIANFMQLVELDVSRNEIPEIPESISFCKALQVADFSGNPLTRLPESFPELQNLTCLSVNDISLQSLPENIGNLYNLASLELRENLLTYLPDSLTQLRRLEELDLGNNEIYNLNQLEPSYI

SEQ ID NO: 152 - protein, 445 aa, Homo sapiens
MLCYVTRPDAVLMEVEVEAKANGEDCLNQVCRRLGIIEVDYFGLQFTGSKGESLWLNLRNRISQQMDGLAPYRLKLRVKFFVEPHLILQEQTRHIFFLHIKEALLAGHLLCSPEQAVELSALLAQTKFGDYNQNTAKYNYEELCAKELSSATLNSIVAKHKELEGTSQASAEYQVLQIVSAMENYGIEWHSVRDSEGQKLLIGVGPEGISICKDDFSPINRIAYPVVQMATQSGKNVYLTVTKESGNSIVLLFKMISTRAASGLYRAITETHAFYRCDTVTSAVMMQYSRDLKGHLASLFLNENINLGKKYVFDIKRTSKEVYDHARRALYNAGVVDLVSRNNQSPSHSPLKSSESSMNCSSCEGLSCQQTRVLQEKLRKLKEAMLCMVCCEEEINSTFCPCGHTVCCESCAAQLQSCPVCRSRVEHVQHVYLPTHTSLLNLTVI

SEQ ID NO: 153 - protein, 134 aa, Homo sapiens
MENYGIEWHSVRDSEGQKLLIGVGPEGISICKDDFSPINRIAYPVVQMATQSGKNVYLTVTKESGNSIVLLFKMISTRAASGLYRAITETHAFYRCDTVTSAVMMQYSRDLKGHLASLFLNENINLGKKYVFDI

SEQ ID NO: 154 - protein, 447 aa, Homo sapiens
MSLWLGAPVPDIPPDSAVELWKPGAQDASSQAQGGSSCILREEARMPHSAGGTAGVGLEAAEPTALLTRAEPPSEPTEIRPQKRKKGPAPKMLGNELCSVCGDKASGFHYNVLSCEGCKGFFRRSVIKGAHYICHSGGHCPMDTYMRRKCQECRLRKCRQAGMREECVLSEEQIRLKKLKRQEEEQAHATSLPPRASSPPQILPQLSPEQLGMIEKLVAAQQQCNRRSFSDRLRVTPWPMAPDPHSREARQQRFAHFTELAIVSVQEIVDFAKQLPGFLQLSREDQIALLKTSAIEVMLLETSRRYNPGSESITFLKDFSYNREDFAKAGLQVEFINPIFEFSRAMNELQLNDAEFALLIAISIFSADRPNVQDQLQVERLQHTYVEALHAYVSIHHPHDRLMFPRMLMKLVSLRTLSSVHSEQVFALRLQDKKLPPLLSEIWDVHE

SEQ ID NO: 155 - protein, 387 aa, Homo sapiens
MSLWLGAPVPDIPPDSAVELWKPGAQDASSQAQGGSSCILREEARMPHSAGGTAGVGLEAAEPTALLTRAEPPSEPTEIRPQKRKKGPAPKMLGNELCSVCGDKASGFHYNVLSCEGCKGFFRRSVIKGAHYICHSGGHCPMDTYMRRKCQECRLRKCRQAGMREECVLSEEQIRLKKLKRQEEEQAHATSLPPRASSPPQILPQLSPEQLGMIEKLVAAQQQCNRRSFSDRLRVTVMLLETSRRYNPGSESITFLKDFSYNREDFAKAGLQVEFINPIFEFSRAMNELQLNDAEFALLIAISIFSADRPNVQDQLQVERLQHTYVEALHAYVSIHHPHDRLMFPRMLMKLVSLRTLSSVHSEQVFALRLQDKKLPPLLSEIWDVHE

SEQ ID NO: 156 - protein, 402 aa, Homo sapiens
MPHSAGGTAGVGLEAAEPTALLTRAEPPSEPTEIRPQKRKKGPAPKMLGNELCSVCGDKASGFHYNVLSCEGCKGFFRRSVIKGAHYICHSGGHCPMDTYMRRKCQECRLRKCRQAGMREECVLSEEQIRLKKLKRQEEEQAHATSLPPRASSPPQILPQLSPEQLGMIEKLVAAQQQCNRRSFSDRLRVTPWPMAPDPHSREARQQRFAHFTELAIVSVQEIVDFAKQLPGFLQLSREDQIALLKTSAIEVMLLETSRRYNPGSESITFLKDFSYNREDFAKAGLQVEFINPIFEFSRAMNELQLNDAEFALLIAISIFSADRPNVQDQLQVERLQHTYVEALHAYVSIHHPHDRLMFPRMLMKLVSLRTLSSVHSEQVFALRLQDKKLPPLLSEIWDVHE

SEQ ID NO: 157 - protein, 256 aa, Homo sapiens
MATQRKHLVKDFNPYITCYICKGYLIKPTTVTECLHTFCKTCIVQHFEDSNDCPRCGNQVHETNPLEMLRLDNTLEEIIFKLVPGLREQELERESEFWKKNKPQENGQDDTSKADKPKVDEEGDENEDDKDYHRSDPQIAICLDCLRNNGQSGDNVVKGLMKKFIRCSTRVTVGTIKKFLSLKLKLPSSYELDVLCNGEIMGKDHTMEFIYMTRWRLRGENFRCLNCSASQVCSQDGPLYQSYPMVLQYRPRIDFG

SEQ ID NO: 158 - protein, 49 aa, Homo sapiens
MATQRKHLVKDFNPYITCYICKGYLIKPTTVTECLHTSAESYWMSTWMS

SEQ ID NO: 159 - protein, 329 aa, Homo sapiens
MSGVVPTAPEQPAGEMENQTKPPDPRPDAPPEYNSHFLPGPPGTAVPPPTGYPGGLPMGYYSPQQPSTFPLYQPVGGIHPVRYQPGKYPMPNQSVPITWMPGPTPMANCPPGLEYLVQLDNIHVLQHFEPLEMMTCFETNNRYDIKNNSDQMVYIVTEDTDDFTRNAYRTLRPFVLRVTDCMGREIMTMQRPFRCTCCCFCCPSARQELEVQCPPGVTIGFVAEHWNLCRAVYSIQNEKKENVMRVRGPCSTYGCGSDSVFEVKSLDGISNIGSIIRKWNGLLSAMADADHFDIHFPLDLDVKMKAMIFGACFLIDFMYFERSPPQRSR

SEQ ID NO: 160 - protein, 224 aa, Homo sapiens
MENQTKPPDPRPDAPPEYNSHFLPGPPGTAVPPPTGYPGGLPMGYYSPQQPSTFPLYQPVGGIHPVRYQPGKYPMPNQSVPITWMPGPTPMANCPPGLEYLVQLEVQCPPGVTIGFVAEHWNLCRAVYSIQNEKKENVMRVRGPCSTYGCGSDSVFEVKSLDGISNIGSIIRKWNGLLSAMADADHFDIHFPLDLDVKMKAMIFGACFLIDFMYFERSPPQRSR

SEQ ID NO: 161 - protein, 1283 aa, Homo sapiens [sequence omitted]

SEQ ID NO: 162 - protein, 649 aa, Homo sapiens
MSLMVSAGRGLGAVWSPTHVQVTVLQARGLRAKGPGGTSDAYAVIQVGKEKYATSVSERSLGAPVWREEATFELPSLLSSGPAAAATLQLTVLHRALLGLDKFLGRAEVDLRDLHRDQGRRKTQWYKLKSKPGKKDKERGEIEVDIQFMRNNMTASMFDLSMKDKSRNPFGKLKDKIKGKNKDSGSDTASAIIPSTTPSVDSDDESVVKDKKKKSKIKTLLSKSNLQKTPLSQSMSVLPTSKPEKVLLRPGDFQSQWDEDDNEDESSSASDVMSHKRTASTDLKQLNQVNFTLPKKEGLSFLGGLRSKNDVLSRSNVCINGNHVYLEQPEAKGEIKDSSPSSSPSPKGFRKKHLFSSTENLAAGSWKEPAEGGGLSSDRQLSESSTKDSLKSMTLPSYRPAPLVSGDLRENMAPANSEATKEAKESKKPESRRSSLLSLMTGKKDVAKGSEGENPLTVPGREKEGMLMGVKPGEDASGPAEDLVRRSEKDTAAVVSRQGSSLNLFEDVQITEPEAEPESKSEPRPPISSPRAPQTRAVKPRLHPVKPMNAMATKVANCSLGTATIISENLNNEVMMKKYSPSDPAFAYAQLTHDELIQLVLKQKETISKKEFQVRELEDYIDNLLVRVMEETPNILRIPTQVGKKAGKM

SEQ ID NO: 163 - protein, 612 aa, Homo sapiens
MGRTRETGTEKNTSSLELEESLPEQPETGRQEEELPRFPCKKQDYSPSSGEAQEVPFALSLSSDGAVSPVGELAAGGDRDLESQAGSLVESKARDAAEEVAPPLPMGASVPSIDSMMRKLEEMGLNLRKDQKKTKKRVSFSEQLFTEEAVAGAALLVEGHSSCPQELNPAWSVAGNASDGEPPESPHAEDSERESVTTPGPATCGAPASPADHLLLPSQEESFSEVPMSEASSAKDTPLFRMEGEDALVTQYQSKASDHEGLLSDPLSDLQLVSDFKSPIMADLNLSLPSIPEVASDDERIDQVEDDGDQVEDDGETAKSSTLDIGALSLGLVVPCPERGKGPSGEADRLVLGEGLCDFRLQAPQASVTAPSEQTTEFGIHKPHLGKSSSLDKQLPGPSGGEEEKPMGNGSPSPPPGTSLDNPVPSPSPSEIFPVTHSFPSSAHSDTHHTSTAESQKKATAEGSAGRVENFGKRKPLLQAWVSPSETHPVSAQPGAGTGSAKHRLHPVKPMNAMATKVANCSLGTATIISENLNNEVMMKKYSPSDPAFAYAQLTHDELIQLVLKQKETISKKEFQVRELEDYIDNLLVRVMEETPNILRIPTQVGKKAGKM

SEQ ID NO: 164 - protein, 439 aa, Homo sapiens
MRNNMTASMFDLSMKDKSRNPFGKLKDKIKGKNKDSGSDTASAIIPSTTPSVDSDDESVVKDKKKKSKIKTLLSKSNLQKTPLSQSMSVLPTSKPEKVLLRPGDFQSQWDEDDNEDESSSASDVMSHKRTASTDLKQLNQVNFTLPKKEGLSFLGGLRSKNDVLSRSNVCINGNHVYLEQPEAKGEIKDSSPSSSPSPKGFRKKHLFSSTENLAAGSWKEPAEGGGLSSDRQLSESSTKDSLKSMTLPSYRPAPLVSGDLRENMAPANSEATKEAKESKKPESRRSSLLSLMTGKKDVAKGSEGENPLTVPGREKEGMLMGVKPGEDASGPAEDLVRRSEKDTAAVVSRQGSSLNLFEDVQITEPEAEPESKSEPRPPISSPRAPQTRAVKPRLHPVKPMNAMATKVANCSLGTATIISENLNNEVMMKVCPLRSWCVR

SEQ ID NO: 165 - protein, 142 aa, Homo sapiens
MSLMVSAGRGLGAVWSPTHVQVTVLQARGLRAKGPGGTSDAYAVIQVGKEKYATSVSERSLGAPVWREEATFELPSLLSSGPAAAATLQLTVLHRALLGLDKFLGRAEVDLRDLHSSLGKSFFKTLKKRAWAIFLRLCLKKN

SEQ ID NO: 166 - protein, 1020 aa, Homo sapiens
MREPEELMPDSGAVFTFGKSKFAENNPGKFWFKNDVPVHLSCGDEHSAVVTGNNKLYMFGSNNWGQLGLGSKSAISKPTCVKALKPEKVKLAACGRNHTLVSTEGGNVYATGGNNEGQLGLGDTEERNTFHVISFFTSEHKIKQLSAGSNTSAALTEDGRLFMWGDNSEGQIGLKNVSNVCVPQQVTIGKPVSWISCGYYHSAFVTTDGELYVFGEPENGKLGLPNQLLGNHRTPQLVSEIPEKVIQVACGGEHTVVLTENAVYTFGLGQFGQLGLGTFLFETSEPKVIENIRDQTISYISCGENHTALITDIGLMYTFGDGRHGKLGLGLENFTNHFIPTLCSNFLRFIVKLVACGGCHMVVFAAPHRGVAKEIEFDEINDTCLSVATFLPYSSLTSGNVLQRTLSARMRRRERERSPDSFSMRRTLPPIEGTLGLSACFLPNSVFPRCSERNLQESVLSEQDLMQPEEPDYLLDEMTKEAEIDNSSTVESLGETTDILNMTHIMSLNSNEKSLKLSPVQKQKKQQTIGELTQDTALTENDDSDEYEEMSEMKEGKACKQHVSQGIFMTQPATTIEAFSDEEVGNDTGQVGPQADTDGEGLQKEVYRHENNNGVDQLDAKEIEKESDGGHSQKESEAEEIDSEKETKLAEIAGMKDLREREKSTKKMSPFFGNLPDRGMNTESEENKDFVKKRESCKQDVIFDSERESVEKPDSYMEGASESQQGIADGFQQPEAIEFSSGEKEDDEVETDQNIRYGRKLIEQGNEKETKPIISKSMAKYDFKCDRLSEIPEEKEGAEDSKGNGIEEQEVEANEENVKVHGGRKEKTEILSDDLTDKAEDHEFSKTEELKLEDVDEEINAENVESKKKTVGDDESVPTGYHSKTEGAERTNDDSSAETIEKKEKANLEERAICEYNENPKGYMLDDADSSSLEILENSETTPSKDMKKTKKIFLFKRVPSINQKIVKNNNEPLPEIKSIGDQIILKSDNKDADQNHMSQNHQNIPPTNTERRSKSCTIL

SEQ ID NO: 167 - protein, 815 aa, Homo sapiens
MREPEELMPDSGAVFTFGKSKFAENNPGKFWFKNDVPVHLSCGDEHSAVVTGNNKLYMFGSNNWGQLGLGSKSAISKPTCVKALKPEKVKLAACGRNHTLVSTEGGNVYATGGNNEGQLGLGDTEERNTFHVISFFTSEHKIKQLSAGSNTSAALTEDGRLFMWGDNSEGQIGLKNVSNVCVPQQVTIGKPVSWISCGYYHSAFVTTDGELYVFGEPENGKLGLPNQLLGNHRTPQLVSEIPEKVIQVACGGEHTVVLTENAVYTFGLGQFGQLGLGTFLFETSEPKVIENIRDQTISYISCGENHTALITDIGLMYTFGDGRHGKLGLGLENFTNHFIPTLCSNFLRFIVKLVACGGCHMVVFAAPHRGVAKEIEFDEINDTCLSVATFLPYSSLTSGNVLQRTLSARMRRRERERSPDSFSMRRTLPPIEGTLGLSACFLPNSVFPRCSERNLQESVLSEQDLMQPEEPDYLLDEMTKEAEIDNSSTVESLGETTDILNMTHIMSLNSNEKSLKLSPVQKQKKQQTIGELTQDTALTENDDSDEYEEMSEMKEGKACKQHVSQGIFMTQPATTIEAFSDEEVEIPEEKEGAEDSKGNGIEEQEVEANEENVKVHGGRKEKTEILSDDLTDKAEDHEFSKTEELKLEDVDEEINAENVESKKKTVGDDESVPTGYHSKTEGAERTNDDSSAETIEKKEKANLEERAICEYNENPKGYMLDDADSSSLEILENSETTPSKDMKKTKKIFLFKRVPSINQKIVKNNNEPLPEIKSIGDQIILKSDNKDADQNHMSQNHQNIPPTNTERRSKSCTIL

SEQ ID NO: 168 - protein, 646 aa, Homo sapiens
MREPEELMPDSGAVFTFGKSKFAENNPGKFWFKNDVPVHLSCGDEHSAVVTGNNKLYMFGSNNWGQLGLGSKSAISKPTCVKALKPEKVKLAACGRNHTLVSTEGGNVYATGGNNEGQLGLGDTEERNTFHVISFFTSEHKIKQLSAGSNTSAALTEDGRLFMWGDNSEGQIGLKNVSNVCVPQQVTIGKPVSWISCGYYHSAFVTTDGELYVFGEPENGKLGLPNQLLGNHRTPQLVSEIPEKVIQVACGGEHTVVLTENAVYTFGLGQFGQLGLGTFLFETSEPKVIENIRDQTISYISCGENHTALITDIGLMYTFGDGRHGKLGLGLENFTNHFIPTLCSNFLRFIVKLVACGGCHMVVFAAPHRGVAKEIEFDEINDTCLSVATFLPYSSLTSGNVLQRTLSARMRRRERERSPDSFSMRRTLPPIEGTLGLSACFLPNSVFPRCSERNLQESVLSEQDLMQPEEPDYLLDEMTKEAEIDNSSTVESLGETTDILNMTHIMSLNSNEKSLKLSPVQKQKKQQTIGELTQDTALTENDDSDEYEEMSEMKEGKACKQHVSQGIFMTQPATTIEAFSDEEVEIPEEKEGAEDSKGNGIEEQEVEANEENVKVHGGRKEKTEILSDDLTDKAEYSASHSQIVSV

SEQ ID NO: 169 - protein, 753 aa, Homo sapiens
MREPEELMPDSGAVFTFGKSKFAENNPGKFWFKNDVPVHLSCGDEHSAVVTGNNKLYMFGSNNWGQLGLGSKSAISKPTCVKALKPEKVKLAACGRNHTLVSTEGGNVYATGGNNEGQLGLGDTEERNTFHVISFFTSEHKIKQLSAGSNTSAALTEDGRLFMWGDNSEGQIGLKNVSNVCVPQQVTIGKPVSWISCGYYHSAFVTTDGELYVFGEPENGKLGLPNQLLGNHRTPQLVSEIPEKVIQVACGGEHTVVLTENAVYTFGLGQFGQLGLGTFLFETSEPKVIENIRDQTISYISCGENHTALITDIGLMYTFGDGRHGKLGLGLENFTNHFIPTLCSNFLRFIVKLERSPDSFSMRRTLPPIEGTLGLSACFLPNSVFPRCSERNLQESVLSEQDLMQPEEPDYLLDEMTKEAEIDNSSTVESLGETTDILNMTHIMSLNSNEKSLKLSPVQKQKKQQTIGELTQDTALTENDDSDEYEEMSEMKEGKACKQHVSQGIFMTQPATTIEAFSDEEVEIPEEKEGAEDSKGNGIEEQEVEANEENVKVHGGRKEKTEILSDDLTDKAEDHEFSKTEELKLEDVDEEINAENVESKKKTVGDDESVPTGYHSKTEGAERTNDDSSAETIEKKEKANLEERAICEYNENPKGYMLDDADSSSLEILENSETTPSKDMKKTKKIFLFKRVPSINQKIVKNNNEPLPEIKSIGDQIILKSDNKDADQNHMSQNHQNIPPTNTERRSKSCTIL

SEQ ID NO: 170 - protein, 480 aa, Homo sapiens
MREPEELMPDSGAVFTFGKSKFAENNPGKFWFKNDVPVHLSCGDEHSAVVTGNNKLYMFGSNNWGQLGLGSKSAISKPTCVKALKPEKVKLAACGRNHTLVSTEGGNVYATGGNNEGQLGLGDTEERNTFHVISFFTSEHKIKQLSAGSNTSAALTEDGRLFMWGDNSEGQIGLKNVSNVCVPQQVTIGKPVSWISCGYYHSAFVTTDGELYVFGEPENGKLGLPNQLLGNHRTPQLVSEIPEKVIQVACGGEHTVVLTENAVYTFGLGQFGQLGLGTFLFETSEPKVIENIRDQTISYISCGENHTALITDIGLMYTFGDGRHGKLGLGLENFTNHFIPTLCSNFLRFIVKLVACGGCHMVVFAAPHRGVAKEIEFDEINDTCLSVATFLPYSSLTSGNVLQRTLSARMRRRERERSPDSFSMRRTLPPIEGTLGLSACFLPNSVFPRCSERNLQESVLSEQDLMQPEEPDTHHEPEFQ

SEQ ID NO: 171 - protein, 1152 aa, Homo sapiens
MREPEELMPDSGAVFTFGKSKFAENNPGKFWFKNDVPVHLSCGDEHSAVVTGNNKLYMFGSNNWGQLGLGSKSAISKPTCVKALKPEKVKLAACGRNHTLVSTEGGNVYATGGNNEGQLGLGDTEERNTFHVISFFTSEHKIKQLSAGSNTSAALTEDGRLFMWGDNSEGQIGLKNVSNVCVPQQVTIGKPVSWISCGYYHSAFVTTDGELYVFGEPENGKLGLPNQLLGNHRTPQLVSEIPEKVIQVACGGEHTVVLTENAVYTFGLGQFGQLGLGTFLFETSEPKVIENIRDQTISYISCGENHTALITDIGLMYTFGDGRHGKLGLGLENFTNHFIPTLCSNFLRFIVKLVACGGCHMVVFAAPHRGVAKEIEFDEINDTCLSVATFLPYSSLTSGNVLQRTLSARMRRRERERSPDSFSMRRTLPPIEGTLGLSACFLPNSVFPRCSERNLQESVLSEQDLMQPEEPDYLLDEMTKEAEIDNSSTVESLGETTDILNMTHIMSLNSNEKSLKLSPVQKQKKQQTIGELTQDTALTENDDSDEYEEMSEMKEGKACKQHVSQGIFMTQPATTIEAFSDEEVEIPEEKEGAEDSKGNGIEEQEVEANEENVKVHGGRKEKTEILSDDLTDKAEVSEGKAKSVGEAEDGPEGRGDGTCEEGSSGAEHWQDEEREKGEKDKGRGEMERPGEGEKELAEKEEWKKRDGEEQEQKEREQGHQKERNQEMEEGGEEEHGEGEEEEGDREEEEEKEGEGKEEGEGEEVEGEREKEEGERKKEERAGKEEKGEEEGDQGEGEEEETEGRGEEKEEGGEVEGGEVEEGKGEREEEEEEGEGEEEEGEGEEEEGEGEEEEGEGKGEEEGEEGEGEEEGEEGEGEGEEEEGEGEGEEEGEGEGEEEEGEGEGEEEGEGEGEEEEGEGKGEEEGEEGEGEGEEEEGEGEGEDGEGEGEEEEGEWEGEEEEGEGEGEEEGEGEGEEGEGEGEEEEGEGEGEEEEGEEEGEEEGEGEEEGEGEGEEEEEGEVEGEVEGEEGEGEGEEEEGEEEGEEREKEGEGEENRRNREEEEEEEGKYQETGEEENERQDGEEYKKVSKIKGSVKYGKHKTYQKKSVTNTQGNGKEQRSKMPVQSKRLLKNGPSGSKKFWNNVLPHYLELK

SEQ ID NO: 172 - protein, 604 aa, Homo sapiens
MISVKRNTWRALSLVIGDCRKKGNFEYCQDRTEKHSTMPDSPVDVKTQSRLTPPTMPPPPTTQGAPRTSSFTPTTLTNGTSHSPTALNGAPSPPNGFSNGPSSSSSSSLANQQLPPACGARQLSKLKRFLTTLQQFGNDISPEIGERVRTLVLGLVNSTLTIEEFHSKLQEATNFPLRPFVIPFLKANLPLLQRELLHCARLAKQNPAQYLAQHEQLLLDASTTSPVDSSELLLDVNENGKRRTPDRTKENGFDREPLHSEHPSKRPCTISPGQRYSPNNGLSYQPNGLPHPTPPPPQHYRLDDMAIAHHYRDSYRHPSHRDLRDRNRPMGLHGTRQEEMIDHRLTDREWAEEWKHLDHLLNCIMDMVEKTRRSLTVLRRCQEADREELNYWIRRYSDAEDLKKGGGSSSSHSRQQSPVNPDPVALDAHREFLHRPASGYVPEEIWKKAEEAVNEVKRQAMTELQKAVSEAERKAHDMITTERAKMERTVAEAKRQAAEDALAVINQQEDSSESCWNCGRKASETCSGCNTARYCGSFCQHKDWEKHHHICGQTLQAQQQGDTPAVSSSVTPNSGAGSPMDTPPAATPRSTTPGTPSTIETTPR

SEQ ID NO: 173 - protein, 577 aa, Homo sapiens
MPDRTEKHSTMPDSPVDVKTQSRLTPPTMPPPPTTQGAPRTSSFTPTTLTNGTSHSPTALNGAPSPPNGFSNGPSSSSSSSLANQQLPPACGARQLSKLKRFLTTLQQFGNDISPEIGERVRTLVLGLVNSTLTIEEFHSKLQEATNFPLRPFVIPFLKANLPLLQRELLHCARLAKQNPAQYLAQHEQLLLDASTTSPVDSSELLLDVNENGKRRTPDRTKENGFDREPLHSEHPSKRPCTISPGQRYSPNNGLSYQPNGLPHPTPPPPQHYRLDDMAIAHHYRDSYRHPSHRDLRDRNRPMGLHGTRQEEMIDHRLTDREWAEEWKHLDHLLNCIMDMVEKTRRSLTVLRRCQEADREELNYWIRRYSDAEDLKKGGGSSSSHSRQQSPVNPDPVALDAHREFLHRPASGYVPEEIWKKAEEAVNEVKRQAMTELQKAVSEAERKAHDMITTERAKMERTVAEAKRQAAEDALAVINQQEDSSESCWNCGRKASETCSGCNTARYCGSFCQHKDWEKHHHICGQTLQAQQQGDTPAVSSSVTPNSGAGSPMDTPPAATPRSTTPGTPSTIETTPR

SEQ ID NO: 174 - protein, 615 aa, Homo sapiens
MCHPDKAFTSDKLQCVFNEYKAAVWVPPRPRPLSRAPLPEDRTEKHSTMPDSPVDVKTQSRLTPPTMPPPPTTQGAPRTSSFTPTTLTNGTSHSPTALNGAPSPPNGFSNGPSSSSSSSLANQQLPPACGARQLSKLKRFLTTLQQFGNDISPEIGERVRTLVLGLVNSTLTIEEFHSKLQEATNFPLRPFVIPFLKANLPLLQRELLHCARLAKQNPAQYLAQHEQLLLDASTTSPVDSSELLLDVNENGKRRTPDRTKENGFDREPLHSEHPSKRPCTISPGQRYSPNNGLSYQPNGLPHPTPPPPQHYRLDDMAIAHHYRDSYRHPSHRDLRDRNRPMGLHGTRQEEMIDHRLTDREWAEEWKHLDHLLNCIMDMVEKTRRSLTVLRRCQEADREELNYWIRRYSDAEDLKKGGGSSSSHSRQQSPVNPDPVALDAHREFLHRPASGYVPEEIWKKAEEAVNEVKRQAMTELQKAVSEAERKAHDMITTERAKMERTVAEAKRQAAEDALAVINQQEDSSESCWNCGRKASETCSGCNTARYCGSFCQHKDWEKHHHICGQTLQAQQQGDTPAVSSSVTPNSGAGSPMDTPPAATPRSTTPGTPSTIETTPR

SEQ ID NO: 175 - protein, 567 aa, Homo sapiens
MPDSPVDVKTQSRLTPPTMPPPPTTQGAPRTSSFTPTTLTNGTSHSPTALNGAPSPPNGFSNGPSSSSSSSLANQQLPPACGARQLSKLKRFLTTLQQFGNDISPEIGERVRTLVLGLVNSTLTIEEFHSKLQEATNFPLRPFVIPFLKANLPLLQRELLHCARLAKQNPAQYLAQHEQLLLDASTTSPVDSSELLLDVNENGKRRTPDRTKENGFDREPLHSEHPSKRPCTISPGQRYSPNNGLSYQPNGLPHPTPPPPQHYRLDDMAIAHHYRDSYRHPSHRDLRDRNRPMGLHGTRQEEMIDHRLTDREWAEEWKHLDHLLNCIMDMVEKTRRSLTVLRRCQEADREELNYWIRRYSDAEDLKKGGGSSSSHSRQQSPVNPDPVALDAHREFLHRPASGYVPEEIWKKAEEAVNEVKRQAMTELQKAVSEAERKAHDMITTERAKMERTVAEAKRQAAEDALAVINQQEDSSESCWNCGRKASETCSGCNTARYCGSFCQHKDWEKHHHICGQTLQAQQQGDTPAVSSSVTPNSGAGSPMDTPPAATPRSTTPGTPSTIETTPR

SEQ ID NO: 176 - protein, 427 aa, Homo sapiens
MISVKRNTWRALSLVIGDCRKKGNFEYCQDRTEKHSTMPDSPVDVKTQSRLTPPTMPPPPTTQGAPRTSSFTPTTLTNGTSHSPTALNGAPSPPNGFSNGPSSSSSSSLANQQLPPACGARQLSKLKRFLTTLQQFGNDISPEIGERVRTLVLGLVNSTLTIEEFHSKLQEATNFPLRPFVIPFLKANLPLLQRELLHCARLAKQNPAQYLAQHEQLLLDASTTSPVDSSELLLDVNENGKRRTPDRTKENGFDREPLHSEHPSKRPCTISPGQRYSPNNGLSYQPNGLPHPTPPPPQHYRLDDMAIAHHYRDSYRHPSHRDLRDRNRPMGLHGTRQEEMIDHRLTDREWAEEWKHLDHLLNCIMDMVEKTRRSLTVLRRCQEADREELNYWIRRYSDAEDLKKGGGSSSSHSRQQSPVNPDPVALG

SEQ ID NO: 177 - protein, 400 aa, Homo sapiens
MPDRTEKHSTMPDSPVDVKTQSRLTPPTMPPPPTTQGAPRTSSFTPTTLTNGTSHSPTALNGAPSPPNGFSNGPSSSSSSSLANQQLPPACGARQLSKLKRFLTTLQQFGNDISPEIGERVRTLVLGLVNSTLTIEEFHSKLQEATNFPLRPFVIPFLKANLPLLQRELLHCARLAKQNPAQYLAQHEQLLLDASTTSPVDSSELLLDVNENGKRRTPDRTKENGFDREPLHSEHPSKRPCTISPGQRYSPNNGLSYQPNGLPHPTPPPPQHYRLDDMAIAHHYRDSYRHPSHRDLRDRNRPMGLHGTRQEEMIDHRLTDREWAEEWKHLDHLLNCIMDMVEKTRRSLTVLRRCQEADREELNYWIRRYSDAEDLKKGGGSSSSHSRQQSPVNPDPVALG

SEQ ID NO: 178 - protein, 571 aa, Homo sapiens
MTRAGDHNRQRGCCGSLADYLTSAKFLLYLGHSLSTWGDRMWHFAVSVFLVELYGNSLLLTAVYGLVVAGSVLVLGAIIGDWVDKNARLKVAQTSLVVQNVSVILCGIILMMVFLHKHELLTMYHGWVLTSCYILIITIANIANLASTATAITIQRDWIVVVAGEDRSKLANMNATIRRIDQLTNILAPMAVGQIMTFGSPVIGCGFISGWNLVSMCVEYVLLWKVYQKTPALAVKAGLKEEETELKQLNLHKDTEPKPLEGTHLMGVKDSNIHELEHEQEPTCASQMAEPFRTFRDGWVSYYNQPVFLAGMGLAFLYMTVLGFDCITTGYAYTQGLSGSILSILMGASAITGIMGTVAFTWLRRKCGLVRTGLISGLAQLSCLILCVISVFMPGSPLDLSVSPFEDIRSRFIQGESITPTKIPEITTEIYMSNGSNSANIVPETSPESVPIISVSLLFAGVIAARIGLWSFDLTVTQLLQENVIESERGIINGVQNSMNYLLDLLHFIMVILAPNPEAFGLLVLISVSFVAMGHIMYFRFAQNTLGNKLFACGPDAKEVRKENQANTSVV

SEQ ID NO: 179 - protein, 643 aa, Homo sapiens [sequence omitted]

SEQ ID NO: 180 - protein, 750 aa, Homo sapiens
MSQWYELQQLDSKFLEQVHQLYDDSFPMEIRQYLAQWLEKQDWEHAANDVSFATIRFHDLLSQLDDQYSRFSLENNFLLQHNIRKSKRNLQDNFQEDPIQMSMIIYSCLKEERKILENAQRFNQAQSGNIQSTVMLDKQKELDSKVRNVKDKVMCIEHEIKSLEDLQDEYDFKCKTLQNREHETNGVAKSDQKQEQLLLKKMYLMLDNKRKEVVHKIIELLNVTELTQNALINDELVEWKRRQQSACIGGPPNACLDQLQNWFTIVAESLQQVRQQLKKLEELEQKYTYEHDPITKNKQVLWDRTFSLFQQLIQSSFVVERQPCMPTHPQRPLVLKTGVQFTVKLRLLVKLQELNYNLKVKVLFDKDVNERNTVKGFRKFNILGTHTKVMNMEESTNGSLAAEFRHLQLKEQKNAGTRTNEGPLIVTEELHSLSFETQLCQPGLVIDLETTSLPVVVISNVSQLPSGWASILWYNMLVAEPRNLSFFLTPPCARWAQLSEVLSWQFSSVTKRGLNVDQLNMLGEKLLGPNASPDGLIPWTRFCKENINDKNFPFWLWIESILELIKKHLLPLWNDGCIMGFISKERERALLKDQQPGTFLLRFSESSREGAITFTWVERSQNGGEPDFHAVEPYTKKELSAVTFPDIIRNYKVMAAENIPENPLKYLYPNIDKDHAFGKYYSRPKEAPEPMELDGPKGTGYIKTELISVSEVHPSRLQTTDNLLPMSPEEFDEVSRIVGSVEFDSMMNTV

SEQ ID NO: 181 - protein, 712 aa, Homo sapiens
MSQWYELQQLDSKFLEQVHQLYDDSFPMEIRQYLAQWLEKQDWEHAANDVSFATIRFHDLLSQLDDQYSRFSLENNFLLQHNIRKSKRNLQDNFQEDPIQMSMIIYSCLKEERKILENAQRFNQAQSGNIQSTVMLDKQKELDSKVRNVKDKVMCIEHEIKSLEDLQDEYDFKCKTLQNREHETNGVAKSDQKQEQLLLKKMYLMLDNKRKEVVHKIIELLNVTELTQNALINDELVEWKRRQQSACIGGPPNACLDQLQNWFTIVAESLQQVRQQLKKLEELEQKYTYEHDPITKNKQVLWDRTFSLFQQLIQSSFVVERQPCMPTHPQRPLVLKTGVQFTVKLRLLVKLQELNYNLKVKVLFDKDVNERNTVKGFRKFNILGTHTKVMNMEESTNGSLAAEFRHLQLKEQKNAGTRTNEGPLIVTEELHSLSFETQLCQPGLVIDLETTSLPVVVISNVSQLPSGWASILWYNMLVAEPRNLSFFLTPPCARWAQLSEVLSWQFSSVTKRGLNVDQLNMLGEKLLGPNASPDGLIPWTRFCKENINDKNFPFWLWIESILELIKKHLLPLWNDGCIMGFISKERERALLKDQQPGTFLLRFSESSREGAITFTWVERSQNGGEPDFHAVEPYTKKELSAVTFPDIIRNYKVMAAENIPENPLKYLYPNIDKDHAFGKYYSRPKEAPEPMELDGPKGTGYIKTELISVSEV

SEQ ID NO: 182 - protein, 296 aa, Homo sapiens
MLSPKDILRKDLKLVHGYPMTCAFASNWEKIEQFHSRPDDIVIATYPKSGTTWVSEIIDMILNDGDIEKCKRGFITEKVPMLEMTLPGLRTSGIEQLEKNPSPRIVKTHLPTDLLPKSFWENNCKMIYLARNAKDVSVSYYHFDLMNNLQPFPGTWEEYLEKFLTGKVAYGSWFTHVKNWWKKKEEHPILFLYYEDMKENPKEEIKKIIRFLEKNLNDEILDRIIHHTSFEVMKDNPLVNYTHLPTTVMDHSKSPFMRKGTAGDWKNYFTVAQNEKFDAIYETEMSKTALQFRTEI

SEQ ID NO: 183 - protein, 1140 aa, Homo sapiens
MWLKPEEVLLKNALKLWVTQKSSCYFILQRRRGHGEGGGRLTGRLVGALDAVLDSNARVAPFRILLQVPGSQVYSPIACGATLEEINQHWDWLEQNLLHTLSVFDNKDDIASFVKGKVKALIAEETSSRLAEQEEEPEKFREALVKFEARFNFPEAEKLVTYYSCCCWKGRVPRQGWLYLSINHLCFYSFFLGKELKLVVPWVDIQKLERTSNVFLTDTIRITTQNKERDFSMFLNLDEVFKVMEQLADVTLRRLLDNEVFDLDPDLQEPSQITKRDLEARAQNEFFRAFFRLPRKEKLHAVVDCSLWTPFSRCHTTGRMFASDSYICFASREDGCCKIILPLREVVSIEKMEDTSLLPHPIIVSIRSKVAFQFIELRDRDSLVEALLARLKQVHANHPVHYDTSADDDMASLVFHSTSMCSDHRFGDLEMMSSQNSEESEKEKSPLMHPDALVTAFQQSGSQSPDSRMSREQIKISLWNDHFVEYGRTVCMFRTEKIRKLVAMGIPESLRGRLWLLFSDAVTDLASHPGYYGNLVEESLGKCCLVTEEIERDLHRSLPEHPAFQNETGIAALRRVLTAYAHRNPKIGYCQSMNILTSVLLLYTKEEEAFWLLVAVCERMLPDYFNHRVIGAQVDQSVFEELIKGHLPELAEHMNDLSALASVSLSWFLTLFLSIMPLESAVNVVDCFFYDGIKAIFQLGLAVLEANAEDLCSSKDDGQALMILSRFLDHIKNEDSPGPPVGSHHAFFSDDQEPYPVTDISDLIRDSYEKFGDQSVEQIEHLRYKHRIRVLQGHEDTTKQNVLRVVIPEVSILPEDLEELYDLFKREHMMSCYWEQPRPMASRHDPSRPYAEQYRIDARQFAHLFQLVSPWTCGAHTEILAERTFRLLDDNMDQLIEFKAFVSCLDIMYNGEMNEKIKLLYRLHIPPALTENDRDSQSPLRNPLLSTSRPLVFGKPNGDAVDYQKQLKQMIKDLAKEKDKTEKELPKMSQREFIQFCKTLYSMFHEDPEENDLYQAIATVTTLLLQIGEVGQRGSSSGSCSQECGEELRASAPSPEDSVFADTGKTPQDSQAFPEAAERDWTVSLEHILASLLTEQSLVNFFEKPLDMKSKLENAKINQYNLKTFEMSHQSQSELKLSNL

SEQ ID NO: 184 - protein, 897 aa, Homo sapiens
MEQLADVTLRRLLDNEVFDLDPDLQEPSQITKRDLEARAQNEFFRAFFRLPRKEKLHAVVDCSLWTPFSRCHTTGRMFASDSYICFASREDGCCKIILPLREVVSIEKMEDTSLLPHPIIVSIRSKVAFQFIELRDRDSLVEALLARLKQVHANHPVHYDTSADDDMASLVFHSTSMCSDHRFGDLEMMSSQNSEESEKEKSPLMHPDALVTAFQQSGSQSPDSRMSREQIKISLWNDHFVEYGRTVCMFRTEKIRKLVAMGIPESLRGRLWLLFSDAVTDLASHPGYYGNLVEESLGKCCLVTEEIERDLHRSLPEHPAFQNETGIAALRRVLTAYAHRNPKIGYCQSMNILTSVLLLYTKEEEAFWLLVAVCERMLPDYFNHRVIGAQVDQSVFEELIKGHLPELAEHMNDLSALASVSLSWFLTLFLSIMPLESAVNVVDCFFYDGIKAIFQLGLAVLEANAEDLCSSKDDGQALMILSRFLDHIKNEDSPGPPVGSHHAFFSDDQEPYPVTDISDLIRDSYEKFGDQSVEQIEHLRYKHRIRVLQGHEDTTKQNVLRVVIPEVSILPEDLEELYDLFKREHMMSCYWEQPRPMASRHDPSRPYAEQYRIDARQFAHLFQLVSPWTCGAHTEILAERTFRLLDDNMDQLIEFKAFVSCLDIMYNGEMNEKIKLLYRLHIPPALTENDRDSQSPLRNPLLSTSRPLVFGKPNGDAVDYQKQLKQMIKDLAKEKDKTEKELPKMSQREFIQFCKTLYSMFHEDPEENDLYQAIATVTTLLLQIGEVGQRGSSSGSCSQECGEELRASAPSPEDSVFADTGKTPQDSQAFPEAAERDWTVSLEHILASLLTEQSLVNFFEKPLDMKSKLENAKINQYNLKTFEMSHQSQSELKLSNL

SEQ ID NO: 185 - protein, 687 aa, Homo sapiens
MAEELVLERCDLELETNGRDHHTADLCREKLVVRRGQPFWLTLHFEGRNYEASVDSLTFSVVTGPAPSQEAGTKARFPLRDAVEEGDWTATVVDQQDCTLSLQLTTPANAPIGLYRLSLEASTGYQGSSFVLGHFILLFNAWCPADAVYLDSEEERQEYVLTQQGFIYQGSAKFIKNIPWNFGQFEDGILDICLILLDVNPKFLKNAGRDCSRRSSPVYVGRVVSGMVNCNDDQGVLLGRWDNNYGDGVSPMSWIGSVDILRRWKNHGCQRVKYGQCWVFAAVACTVLRCLGIPTRVVTNYNSAHDQNSNLLIEYFRNEFGEIQGDKSEMIWNFHCWVESWMTRPDLQPGYEGWQALDPTPQEKSEGTYCCGPVPVRAIKEGDLSTKYDAPFVFAEVNADVVDWIQQDDGSVHKSINRSLIVGLKISTKSVGRDEREDITHTYKYPEGSSEEREAFTRANHLNKLAEKEETGMAMRIRVGQSMNMGSDFDVFAHITNNTAEEYVCRLLLCARTVSYNGILGPECGTKYLLNLNLEPFSEKSVPLCILYEKYRDCLTESNLIKVRALLVEPVINSYLLAERDLYLENPEIKIRILGEPKQKRKLVAEVSLQNPLPVALEGCTFTVEGAGLTEEQKTVEIPDPVEAGEEVKVRMDLLPLHMGLHKLVVNFESDKLKAVKGFRNVIIGPA

SEQ ID NO: 186 - protein, 548 aa, Homo sapiens
MAEELVLERCDLELETNGRDHHTADLCREKLVVRRGQPFWLTLHFEGRNYEASVDSLTFSVVTGPAPSQEAGTKARFPLRDAVEEGDWTATVVDQQDCTLSLQLTTPANAPIGLYRLSLEASTGYQGSSFVLGHFILLFNAWCPADAVYLDSEEERQEYVLTQQGFIYQGSAKFIKNIPWNFGQFEDGILDICLILLDVNPKFLKNAGRDCSRRSSPVYVGRVVSGMVNCNDDQGVLLGRWDNNYGDGVSPMSWIGSVDILRRWKNHGCQRVKYGQCWVFAAVACTVLRCLGIPTRVVTNYNSAHDQNSNLLIEYFRNEFGEIQGDKSEMIWNFHCWVESWMTRPDLQPGYEGWQALDPTPQEKSEGTYCCGPVPVRAIKEGDLSTKYDAPFVFAEVNADVVDWIQQDDGSVHKSINRSLIVGLKISTKSVGRDEREDITHTYKYPEGSSEEREAFTRANHLNKLAEKEETGMAMRIRVGQSMNMGSDFDVFAHITNNTAEEYVCRLLLCARTVSYNGILGPECGTKYLLNLNLEPFSGKALCSWSIC

SEQ ID NO: 187 - protein, 349 aa, Homo sapiens
MAEELVLERCDLELETNGRDHHTADLCREKLVVRRGQPFWLTLHFEGRNYEASVDSLTFSVVTGPAPSQEAGTKARFPLRDAVEEGDWTATVVDQQDCTLSLQLTTPANAPIGLYRLSLEASTGYQGSSFVLGHFILLFNAWCPADAVYLDSEEERQEYVLTQQGFIYQGSAKFIKNIPWNFGQFEDGILDICLILLDVNPKFLKNAGRDCSRRSSPVYVGRVVSGMVNCNDDQGVLLGRWDNNYGDGVSPMSWIGSVDILRRWKNHGCQRVKYGQCWVFAAVACTGELHAGMWVMSPGRGHEEHWSRNQDIPALVLPPATNTLNALCGLEPVTTLSGPLSNSHPSSGC

SEQ ID NO: 188 - protein, 351 aa, Homo sapiens
MSPRSCLRSLRLLVFAVFSAAASNWLYLAKLSSVGSISEEETCEKLKGLIQRQVQMCKRNLEVMDSVRRGAQLAIEECQYQFRNRRWNCSTLDSLPVFGKVVTQGTREAAFVYAISSAGVAFAVTRACSSGELEKCGCDRTVHGVSPQGFQWSGCSDNIAYGVAFSQSFVDVRERSKGASSSRALMNLHNNEAGRKAILTHMRVECKCHGVSGSCEVKTCWRAVPPFRQVGHALKEKFDGATEVEPRRVGSSRALVPRNAQFKPHTDEDLVYLEPSPDFCEQDMRSGVLGTRGRTCNKTSKAIDGCELLCCGRGFHTAQVELAERCSCKFHWCCFVKCRQCQRLVELHTCR

SEQ ID NO: 189 - protein, 296 aa, Homo sapiens
MCKRNLEVMDSVRRGAQLAIEECQYQFRNRRWNCSTLDSLPVFGKVVTQGTREAAFVYAISSAGVAFAVTRACSSGELEKCGCDRTVHGVSPQGFQWSGCSDNIAYGVAFSQSFVDVRERSKGASSSRALMNLHNNEAGRKAILTHMRVECKCHGVSGSCEVKTCWRAVPPFRQVGHALKEKFDGATEVEPRRVGSSRALVPRNAQFKPHTDEDLVYLEPSPDFCEQDMRSGVLGTRGRTCNKTSKAIDGCELLCCGRGFHTAQVELAERCSCKFHWCCFVKCRQCQRLVELHTCR

SEQ ID NO: 190 - protein, 1279 aa, Homo sapiens
MASSNPPPQPAIGDQLVPGVPGPSSEAEDDPGEAFEFDDSDDEEDTSAALGVPSLAPERDTDPPLIHLDSIPVTDPDPAAAPPGTGVPAWVSNGDAADAAFSGARHSSWKRKSSRRIDRFTFPALEEDVIYDDVPCESPDAHQPGAERNLLYEDAHRAGAPRQAEDLGWSSSEFESYSEDSGEEAKPEVEVEPAKHRVSFQPKLSPDLTRLKERYARTKRDILALRVGGRDMQELKHKYDCKMTQLMKAAKSGTKDGLEKTRMAVMRKVSFLHRKDVLGDSEEEDMGLLEVSVSDIKPPAPELGPMPEGLSPQQVVRRHILGSIVQSEGSYVESLKRILQDYRNPLMEMEPKALSARKCQVVFFRVKEILHCHSMFQIALSSRVAEWDSTEKIGDLFVASFSKSMVLDVYSDYVNNFTSAMSIIKKACLTKPAFLEFLKRRQVCSPDRVTLYGLMVKPIQRFPQFILLLQDMLKNTPRGHPDRLSLQLALTELETLAEKLNEQKRLADQVAEIQQLTKSVSDRSSLNKLLTSGQRQLLLCETLTETVYGDRGQLIKSKERRVFLLNDMLVCANINFKPANHRGQLEISSLVPLGPKYVVKWNTALPQVQVVEVGQDGGTYDKDNVLIQHSGAKKASASGQAQNKVYLGPPRLFQELQDLQKDLAVVEQITLLISTLHGTYQNLNMTVAQDWCLALQRLMRVKEEEIHSANKCRLRLLLPGKPDKSGRPISFMVVFITPNPLSKISWVNRLHLAKIGLREENQPGWLCPDEDKKSKAPFWCPILACCIPAFSSRALSLQLGALVHSPVNCPLLGFSAVSTSLPQGYLWVGGGQEGAGGQVEIFSLNRPSPRTVKSFPLAAPVLCMEYIPELEEEAESRDESPTVADPSATVHPTICLGLQDGSILLYSSVDTGTQCLVSCRSPGLQPVLCLRHSPFHLLAGLQDGTLAAYPRTSGGVLWDLESPPVCLTVGPGPVRTLLSLEDAVWASCGPRVTVLEATTLQPQQSFEAHQDEAVSVTHMVKAGSGVWMAFSSGTSIRLFHTETLEHLQEINIATRTTFLLPGQKHLCVTSLLICQGLLWVGTDQGVIVLLPVPRLEGIPKITGKGMVSLNGHCGPVAFLAVATSILAPDILRSDQEEAEGPRAEEDKPDGQAHEPMPDSHVGRELTRKKGILLQYRLRSTAHLPGPLLSMREPAPADGAALEHSEEDGSIYEMADDPDIWVRSRPCARDAHRKEICSVAIISGGQGYRNFGSALGSSGRQAPCGETDSTLLIWQVPLML

SEQ ID NO: 191 - protein, 1240 aa, Homo sapiens
MASSNPPPQPAIGDQLVPGVPGPSSEAEDDPGEAFEFDDSDDEEDTSAALGVPSLAPERDTDPPLIHLDSIPVTDPDPAAAPPGTGVPAWVSNGDAADAAFSGARHSSWKRKSSRRIDRFTFPALEEDVIYDDVPCESPDAHQPGAERNLLYEDAHRAGAPRQAEDLGWSSSEFESYSEDSGEEAKPEVEVEPAKHRVSFQPKMTQLMKAAKSGTKDGLEKTRMAVMRKVSFLHRKDVLGDSEEEDMGLLEVSVSDIKPPAPELGPMPEGLSPQQVVRRHILGSIVQSEGSYVESLKRILQDYRNPLMEMEPKALSARKCQVVFFRVKEILHCHSMFQIALSSRVAEWDSTEKIGDLFVASFSKSMVLDVYSDYVNNFTSAMSIIKKACLTKPAFLEFLKRRQVCSPDRVTLYGLMVKPIQRFPQFILLLQDMLKNTPRGHPDRLSLQLALTELETLAEKLNEQKRLADQVAEIQQLTKSVSDRSSLNKLLTSGQRQLLLCETLTETVYGDRGQLIKSKERRVFLLNDMLVCANINFKPANHRGQLEISSLVPLGPKYVVKWNTALPQVQVVEVGQDGGTYDKDNVLIQHSGAKKASASGQAQNKVYLGPPRLFQELQDLQKDLAVVEQITLLISTLHGTYQNLNMTVAQDWCLALQRLMRVKEEEIHSANKCRLRLLLPGKPDKSGRPISFMVVFITPNPLSKISWVNRLHLAKIGLREENQPGWLCPDEDKKSKAPFWCPILACCIPAFSSRALSLQLGALVHSPVNCPLLGFSAVSTSLPQGYLWVGGGQEGAGGQVEIFSLNRPSPRTVKSFPLAAPVLCMEYIPELEEEAESRDESPTVADPSATVHPTICLGLQDGSILLYSSVDTGTQCLVSCRSPGLQPVLCLRHSPFHLLAGLQDGTLAAYPRTSGGVLWDLESPPVCLTVGPGPVRTLLSLEDAVWASCGPRVTVLEATTLQPQQSFEAHQDEAVSVTHMVKAGSGVWMAFSSGTSIRLFHTETLEHLQEINIATRTTFLLPGQKHLCVTSLLICQGLLWVGTDQGVIVLLPVPRLEGIPKITGKGMVSLNGHCGPVAFLAVATSILAPDILRSDQEEAEGPRAEEDKPDGQAHEPMPDSHVGRELTRKKGILLQYRLRSTAHLPGPLLSMREPAPADGAALEHSEEDGSIYEMADDPDIWVRSRPCARDAHRKEICSVAIISGGQGYRNFGSALGSSGRQAPCGETDSTLLIWQVPLML

SEQ ID NO: 192 - protein, 1235 aa, Homo sapiens
MASSNPPPQPAIGDQLVPGVPGPSSEAEDDPGEAFEFDDSDDEEDTSAALGVPSLAPERDTDPPLIHLDSIPVTDPDPAAAPPGTGVPAWVSNGDAADAAFSGARHSSWKRKSSRRIDRFTFPALEEDVIYDDVPCESPDAHQPGAERNLLYEDAHRAGAPRQAEDLGWSSSEFESYSEDSGEEAKPEVEVEPAKHRVSFQPKMTQLMKAAKSGTKDGLEKTRMAVMRKVSFLHRKDVLGDSEEEDMGLLEVSVSDIKPPAPELGPMPEGLSPQQVVRRHILGSIVQSEGSYVESLKRILQDYRNPLMEMEPKALSARKCQVVFFRVKEILHCHSMFQIALSSRVAEWDSTEKIGDLFVASFSKSMVLDVYSDYVNNFTSAMSIIKKACLTKPAFLEFLKRRQVCSPDRVTLYGLMVKPIQRFPQFILLLQDMLKNTPRGHPDRLSLQLALTELETLAEKLNEQKRLADQVAEIQQLTKSVSDRSSLNKLLTSGQRQLLLCETLTETVYGDRGQLIKSKERRVFLLNDMLVCANINFKGQLEISSLVPLGPKYVVKWNTALPQVQVVEVGQDGGTYDKDNVLIQHSGAKKASASGQAQNKVYLGPPRLFQELQDLQKDLAVVEQITLLISTLHGTYQNLNMTVAQDWCLALQRLMRVKEEEIHSANKCRLRLLLPGKPDKSGRPISFMVVFITPNPLSKISWVNRLHLAKIGLREENQPGWLCPDEDKKSKAPFWCPILACCIPAFSSRALSLQLGALVHSPVNCPLLGFSAVSTSLPQGYLWVGGGQEGAGGQVEIFSLNRPSPRTVKSFPLAAPVLCMEYIPELEEEAESRDESPTVADPSATVHPTICLGLQDGSILLYSSVDTGTQCLVSCRSPGLQPVLCLRHSPFHLLAGLQDGTLAAYPRTSGGVLWDLESPPVCLTVGPGPVRTLLSLEDAVWASCGPRVTVLEATTLQPQQSFEAHQDEAVSVTHMVKAGSGVWMAFSSGTSIRLFHTETLEHLQEINIATRTTFLLPGQKHLCVTSLLICQGLLWVGTDQGVIVLLPVPRLEGIPKITGKGMVSLNGHCGPVAFLAVATSILAPDILRSDQEEAEGPRAEEDKPDGQAHEPMPDSHVGRELTRKKGILLQYRLRSTAHLPGPLLSMREPAPADGAALEHSEEDGSIYEMADDPDIWVRSRPCARDAHRKEICSVAIISGGQGYRNFGSALGSSGRQAPCGETDSTLLIWQVPLML

SEQ ID NO: 193 - protein, 982 aa, Homo sapiens
MLPSSSWGKRKLRGRLGWVRSDARGVMWARQEGLHHPHPHAVIRCPSSSSSSVSCSGDSEEEDMGLLEVSVSDIKPPAPELGPMPEGLSPQQVVRRHILGSIVQSEGSYVESLKRILQDYRNPLMEMEPKALSARKCQVVFFRVKEILHCHSMFQIALSSRVAEWDSTEKIGDLFVASDMLKNTPRGHPDRLSLQLALTELETLAEKLNEQKRLADQVAEIQQLTKSVSDRSSLNKLLTSGQRQLLLCETLTETVYGDRGQLIKSKERRVFLLNDMLVCANINFKGQLEISSLVPLGPKYVVKWNTALPQVQVVEVGQDGGTYDKDNVLIQHSGAKKASASGQAQNKVYLGPPRLFQELQDLQKDLAVVEQITLLISTLHGTYQNLNMTVAQDWCLALQRLMRVKEEEIHSANKCRLRLLLPGKPDKSGRPISFMVVFITPNPLSKISWVNRLHLAKIGLREENQPGWLCPDEDKKSKAPFWCPILACCIPAFSSRALSLQLGALVHSPVNCPLLGFSAVSTSLPQGYLWVGGGQEGAGGQVEIFSLNRPSPRTVKSFPLAAPVLCMEYIPELEEEAESRDESPTVADPSATVHPTICLGLQDGSILLYSSVDTGTQCLVSCRSPGLQPVLCLRHSPFHLLAGLQDGTLAAYPRTSGGVLWDLESPPVCLTVGPGPVRTLLSLEDAVWASCGPRVTVLEATTLQPQQSFEAHQDEAVSVTHMVKAGSGVWMAFSSGTSIRLFHTETLEHLQEINIATRTTFLLPGQKHLCVTSLLICQGLLWVGTDQGVIVLLPVPRLEGIPKITGKGMVSLNGHCGPVAFLAVATSILAPDILRSDQEEAEGPRAEEDKPDGQAHEPMPDSHVGRELTRKKGILLQYRLRSTAHLPGPLLSMREPAPADGAALEHSEEDGSIYEMADDPDIWVRSRPCARDAHRKEICSVAIISGGQGYRNFGSALGSSGRQAPCGETDSTLLIWQVPLML

SEQ ID NO: 194 - protein, 1067 aa, Homo sapiens
MASSNPPPQPAIGDQLVPGVPGPSSEAEDDPGEAFEFDDSDDEEDTSAALGVPSLAPERDTDPPLIHLDSIPVTDPDPAAAPPGTGVPAWVSNGDAADAAFSGARHSSWKRKSSRRIDRFTFPALEEDVIYDDVPCESPDAHQPGAERNLLYEDAHRAGAPRQAEDLGWSSSEFESYSEDSGEEAKPEVEVEPAKHRVSFQPKLSPDLTRLKERYARTKRDILALRVGGRDMQELKHKYDCKMTQLMKAAKSGTKDGLEKTRMAVMRKVSFLHRKDVLGDSEEEDMGLLEVSVSDIKPPAPELGPMPEGLSPQQVVRRHILGSIVQSEGSYVESLKRILQDYRNPLMEMEPKALSARKCQVVFFRVKEILHCHSMFQIALSSRVAEWDSTEKIGDLFVASFSKSMVLDVYSDYVNNFTSAMSIIKKACLTKPAFLEFLKRRQVCSPDRVTLYGLMVKPIQRFPQFILLLQDMLKNTPRGHPDRLSLQLALTELETLAEKLNEQKRLADQVAEIQQLTKSVSDRSSLNKLLTSGQRQLLLCETLTETVYGDRGQLIKSKERRVFLLNDMLVCANINFKGQLEISSLVPLGPKYVVKWNTALPQVQVVEVGQDGGTYDKDNVLIQHSGAKKASASGQAQNKVYLGPPRLFQELQDLQKDLAVVEQITLLISTLHGTYQNLNMTVAQDWCLALQRLMRVKEEEIHSANKCRLRLLLPGKPDKSGRPISFMVVFITPNPLSKISWVNRLHLAKIGLREENQPGWLCPDEDKKSKAPFWCPILACCIPAFSSRALSLQLGALVHSPVNCPLLGFSAVSTSLPQGYLWVGGGQEGAGGQVEIFSLNRPSPRTVKSFPLAAPVLCMEYIPELEEEAESRDESPTVADPSATVHPTICLGLQDGSILLYSSVDTGTQCLVSCRSPGLQPVLCLRHSPFHLLAGLQDGTLAAYPRTSGGVLWDLESPPVCLTVGPGPVRTLLSLEDAVWASCGPRVTVLEATTLQPQQSFEAHQDEAVSVTHMVKAGSGVWMAFSSGTSIRLFHTETLEHLQEINIATRTTFLLPDRSLIKCSPRA

SEQ ID NO: 195 - protein, 973 aa, Homo sapiens
MYNMRRLSLSPTFSMGFHLLVTVSLLFSHVDHVIAETEMEGEGNETGECTGSYYCKKGVILPIWEPQDPSFGDKIARATVYFVAMVYMFLGVSIIADRFMSSIEVITSQEKEITIKKPNGETTKTTVRIWNETVSNLTLMALGSSAPEILLSVIEVCGHNFTAGDLGPSTIVGSAAFNMFIIIALCVYVVPDGETRKIKHLRVFFVTAAWSIFAYTWLYIILSVISPGVVEVWEGLLTFFFFPICVVFAWVADRRLLFYKYVYKRYRAGKQRGMIIEHEGDRPSSKTEIEMDGKVVNSHVENFLDGALVLEVDERDQDDEEARREMARILKELKQKHPDKEIEQLIELANYQVLSQQQKSRAFYRIQATRLMTGAGNILKRHAADQARKAVSMHEVNTEVTENDPVSKIFFEQGTYQCLENCGTVALTIIRRGGDLTNTVFVDFRTEDGTANAGSDYEFTEGTVVFKPGDTQKEIRVGIIDDDIFEEDENFLVHLSNVKVSSEASEDGILEANHVSTLACLGSPSTATVTIFDDDHAGIFTFEEPVTHVSESIGIMEVKVLRTSGARGNVIVPYKTIEGTARGGGEDFEDTCGELEFQNDEIVKTISVKVIDDEEYEKNKTFFLEIGEPRLVEMSEKKALLLNELGGFTITGKYLFGQPVFRKVHAREHPILSTVITIADEYDDKQPLTSKEEEERRIAEMGRPILGEHTKLEVIIEESYEFKSTVDKLIKKTNLALVVGTNSWREQFIEAITVSAGEDDDDDECGEEKLPSCFDYVMHFLTVFWKVLFAFVPPTEYWNGWACFIVSILMIGLLTAFIGDLASHFGCTIGLKDSVTAVVFVALGTSVPDTFASKVAATQDQYADASIGNVTGSNAVNVFLGIGVAWSIAAIYHAANGEQFKVSPGTLAFSVTLFTIFAFINVGVLLYRRRPEIGGELGGPRTAKLLTSCLFVLLWLLYIFFSSLEAYCHIKGF

SEQ ID NO: 196 - protein, 937 aa, Homo sapiens
MYNMRRLSLSPTFSMGFHLLVTVSLLFSHVDHVIAETEMEGEGNETGECTGSYYCKKGVILPIWEPQDPSFGDKIARATVYFVAMVYMFLGVSIIADRFMSSIEVITSQEKEITIKKPNGETTKTTVRIWNETVSNLTLMALGSSAPEILLSVIEVCGHNFTAGDLGPSTIVGSAAFNMFIIIALCVYVVPDGETRKIKHLRVFFVTAAWSIFAYTWLYIILSVISPGVVEVWEGLLTFFFFPICVVFAWVADRRLLFYKYVYKRYRAGKQRGMIIEHEGDRPSSKTEIEMDGKVVNSHVENFLDGALVLEVDERDQDDEEARREMARILKELKQKHPDKEIEQLIELANYQVLSQQQKSRAFYRIQATRLMTGAGNILKRHAADQARKAVSMHEVNTEVTENDPVSKIFFEQGTYQCLENCGTVALTIIRRGGDLTNTVFVDFRTEDGTANAGSDYEFTEGTVVFKPGDTQKEIRVGIIDDDIFEEDENFLVHLSNVKVSSEASEDGILEANHVSTLACLGSPSTATVTIFDDDHAGIFTFEEPVTHVSESIGIMEVKVLRTSGARGNVIVPYKTIEGTARGGGEDFEDTCGELEFQNDEIVKIITIRIFDREEYEKECSFSLVLEEPKWIRRGMKGGFTITDEYDDKQPLTSKEEEERRIAEMGRPILGEHTKLEVIIEESYEFKSTVDKLIKKTNLALVVGTNSWREQFIEAITVSAGEDDDDDECGEEKLPSCFDYVMHFLTVFWKVLFAFVPPTEYWNGWACFIVSILMIGLLTAFIGDLASHFGCTIGLKDSVTAVVFVALGTSVPDTFASKVAATQDQYADASIGNVTGSNAVNVFLGIGVAWSIAAIYHAANGEQFKVSPGTLAFSVTLFTIFAFINVGVLLYRRRPEIGGELGGPRTAKLLTSCLFVLLWLLYIFFSSLEAYCHIKGF

SEQ ID NO: 197 - protein, 960 aa, Homo sapiens
MYNMRRLSLSPTFSMGFHLLVTVSLLFSHVDHVIAETEMEGEGNETGECTGSYYCKKGVILPIWEPQDPSFGDKIARATVYFVAMVYMFLGVSIIADRFMSSIEVITSQEKEITIKKPNGETTKTTVRIWNETVSNLTLMALGSSAPEILLSVIEVCGHNFTAGDLGPSTIVGSAAFNMFIIIALCVYVVPDGETRKIKHLRVFFVTAAWSIFAYTWLYIILSVISPGVVEVWEGLLTFFFFPICVVFAWVADRRLLFYKYVYKRYRAGKQRGMIIEHEGDRPSSKTEIEMDGKVVNSHVENFLDGALVLEVDERDQDDEEARREMARILKELKQKHPDKEIEQLIELANYQVLSQQQKSRAFYRIQATRLMTGAGNILKRHAADQARKAVSMHEVNTEVTENDPVSKIFFEQGTYQCLENCGTVALTIIRRGGDLTNTVFVDFRTEDGTANAGSDYEFTEGTVVFKPGDTQKEIRVGIIDDDIFEEDENFLVHLSNVKVSSEASEDGILEANHVSTLACLGSPSTATVTIFDDDHAGIFTFEEPVTHVSESIGIMEVKVLRTSGARGNVIVPYKTIEGTARGGGEDFEDTCGELEFQNDEIVKIITIRIFDREEYEKECSFSLVLEEPKWIRRGMKGGFTITGQPVFRKVHAREHPILSTVITIADEYDDKQPLTSKEEEERRIAEMGRPILGEHTKLEVIIEESYEFKSTVDKLIKKTNLALVVGTNSWREQFIEAITVSAGEDDDDDECGEEKLPSCFDYVMHFLTVFWKVLFAFVPPTEYWNGWACFIVSILMIGLLTAFIGDLASHFGCTIGLKDSVTAVVFVALGTSVPDTFASKVAATQDQYADASIGNVTGSNAVNVFLGIGVAWSIAAIYHAANGEQFKVSPGTLAFSVTLFTIFAFINVGVLLYRRRPEIGGELGGPRTAKLLTSCLFVLLWLLYIFFSSLEAYCHIKGF

SEQ ID NO: 198 - protein, 965 aa, Homo sapiens
MYNMRRLSLSPTFSMGFHLLVTVSLLFSHVDHVIAETEMEGEGNETGECTGSYYCKKGVILPIWEPQDPSFGDKIARATVYFVAMVYMFLGVSIIADRFMSSIEVITSQEKEITIKKPNGETTKTTVRIWNETVSNLTLMALGSSAPEILLSVIEVCGHNFTAGDLGPSTIVGSAAFNMFIIIALCVYVVPDGETRKIKHLRVFFVTAAWSIFAYTWLYIILSVISPGVVEVWEGLLTFFFFPICVVFAWVADRRLLFYKYVYKRYRAGKQRGMIIEHEGDRPSSKTEIEMDGKVVNSHVENFLDGALVLEVDERDQDDEEARREMARILKELKQKHPDKEIEQLIELANYQVLSQQQKSRAFYRIQATRLMTGAGNILKRHAADQARKAVSMHEVNTEVTENDPVSKIFFEQGTYQCLENCGTVALTIIRRGGDLTNTVFVDFRTEDGTANAGSDYEFTEGTVVFKPGDTQKEIRVGIIDDDIFEEDENFLVHLSNVKVSSEASEDGILEANHVSTLACLGSPSTATVTIFDDDHAGIFTFEEPVTHVSESIGIMEVKVLRTSGARGNVIVPYKTIEGTARGGGEDFEDTCGELEFQNDEIVKIITIRIFDREEYEKECSFSLVLEEPKWIRRGMKGGFTITGKYLFGQPVFRKVHAREHPILSTVITIADEYDDKQPLTSKEEEERRIAEMGRPILGEHTKLEVIIEESYEFKSTVDKLIKKTNLALVVGTNSWREQFIEAITVSAGEDDDDDECGEEKLPSCFDYVMHFLTVFWKVLFAFVPPTEYWNGWACFIVSILMIGLLTAFIGDLASHFGCTIGLKDSVTAVVFVALGTSVPDTFASKVAATQDQYADASIGNVTGSNAVNVFLGIGVAWSIAAIYHAANGEQFKVSPGTLAFSVTLFTIFAFINVGVLLYRRRPEIGGELGGPRTAKLLTSCLFVLLWLLYIFFSSLEAYCHIKGF

SEQ ID NO: 199 - protein, 968 aa, Homo sapiens
MYNMRRLSLSPTFSMGFHLLVTVSLLFSHVDHVIAETEMEGEGNETGECTGSYYCKKGVILPIWEPQDPSFGDKIARATVYFVAMVYMFLGVSIIADRFMSSIEVITSQEKEITIKKPNGETTKTTVRIWNETVSNLTLMALGSSAPEILLSVIEVCGHNFTAGDLGPSTIVGSAAFNMFIIIALCVYVVPDGETRKIKHLRVFFVTAAWSIFAYTWLYIILSVISPGVVEVWEGLLTFFFFPICVVFAWVADRRLLFYKYVYKRYRAGKQRGMIIEHEGDRPSSKTEIEMDGKVVNSHVENFLDGALVLEVDERDQDDEEARREMARILKELKQKHPDKEIEQLIELANYQVLSQQQKSRAFYRIQATRLMTGAGNILKRHAADQARKAVSMHEVNTEVTENDPVSKIFFEQGTYQCLENCGTVALTIIRRGGDLTNTVFVDFRTEDGTANAGSDYEFTEGTVVFKPGDTQKEIRVGIIDDDIFEEDENFLVHLSNVKVSSEASEDGILEANHVSTLACLGSPSTATVTIFDDDHAGIFTFEEPVTHVSESIGIMEVKVLRTSGARGNVIVPYKTIEGTARGGGEDFEDTCGELEFQNDEIVKTISVKVIDDEEYEKNKTFFLEIGEPRLVEMSEKKALLLNELGGFTITGQPVFRKVHAREHPILSTVITIADEYDDKQPLTSKEEEERRIAEMGRPILGEHTKLEVIIEESYEFKSTVDKLIKKTNLALVVGTNSWREQFIEAITVSAGEDDDDDECGEEKLPSCFDYVMHFLTVFWKVLFAFVPPTEYWNGWACFIVSILMIGLLTAFIGDLASHFGCTIGLKDSVTAVVFVALGTSVPDTFASKVAATQDQYADASIGNVTGSNAVNVFLGIGVAWSIAAIYHAANGEQFKVSPGTLAFSVTLFTIFAFINVGVLLYRRRPEIGGELGGPRTAKLLTSCLFVLLWLLYIFFSSLEAYCHIKGF

SEQ ID NO: 200 - protein, 311 aa, Homo sapiens
MGLTLLLLLLLGLEGQGIVGSLPEVLQAPVGSSILVQCHYRLQDVKAQKVWCRFLPEGCQPLVSSAVDRRAPAGRRTFLTDLGGGLLQVEMVTLQEEDAGEYGCMVDGARGPQILHRVSLNILPPEEEEETHKIGSLAENAFSDPAGSANPLEPSQDEKSIPLIWGAVLLVGLLVAAVVLFAVMAKRKQGNRLGVCGRFLSSRVSGMNPSSVVHHVSDSGPAAELPLDVPHIRLDSPPSFDNTTYTSLPLDSPSGKPSLPAPSSLPPLPPKVLVCSKPVTYATVIFPGGNKGGGTSCGPAQNPPNNQTPSS

SEQ ID NO: 201 - protein, 199 aa, Homo sapiens
MGLTLLLLLLLGLEGQGIVGSLPEVLQAPVGSSILVQCHYRLQDVKAQKVWCRFLPEGCQPLVSSAVDRRAPAGRRTFLTDLGGGLLQVEMVTLQEEDAGEYGCMVDGARGPQILHRVSLNILPPEEEEETHKIGSLAENAFSDPAGSANPLEPSQDEKSIPLIWGAVLLVGLLVAAVVLFAVMAKRKQESLLSGPPRQ

SEQ ID NO: 202 - protein, 200 aa, Homo sapiens
MGLTLLLLLLLGLEEEEEETHKIGSLAENAFSDPAGSANPLEPSQDEKSIPLIWGAVLLVGLLVAAVVLFAVMAKRKQGNRLGVCGRFLSSRVSGMNPSSVVHHVSDSGPAAELPLDVPHIRLDSPPSFDNTTYTSLPLDSPSGKPSLPAPSSLPPLPPKVLVCSKPVTYATVIFPGGNKGGGTSCGPAQNPPNNQTPSS

SEQ ID NO: 203 - protein, 1037 aa, Homo sapiens
MSPPLCPLLLLAVGLRLAGTLNPSDPNTCSFWESFTTTTKESHSRPFSLLPSEPCERPWEGPHTCPQPTVVYRTVYRQVVKTDHRQRLQCCHGFYESRGFCVPLCAQECVHGRCVAPNQCQCVPGWRGDDCSSECAPGMWGPQCDKPCSCGNNSSCDPKSGVCSCPSGLQPPNCLQPCTPGYYGPACQFRCQCHGAPCDPQTGACFCPAERTGPSCDVSCSQGTSGFFCPSTHSCQNGGVFQTPQGSCSCPPGWMGTICSLPCPEGFHGPNCSQECRCHNGGLCDRFTGQCRCAPGYTGDRCREECPVGRFGQDCAETCDCAPDARCFPANGACLCEHGFTGDRCTDRLCPDGFYGLSCQAPCTCDREHSLSCHPMNGECSCLPGWAGLHCNESCPQDTHGPGCQEHCLCLHGGVCQATSGLCQCAPGYTGPHCASLCPPDTYGVNCSARCSCENAIACSPIDGECVCKEGWQRGNCSVPCPPGTWGFSCNASCQCAHEAVCSPQTGACTCTPGWHGAHCQLPCPKGQFGEGCASRCDCDHSDGCDPVHGRCQCQAGWMGARCHLSCPEGLWGVNCSNTCTCKNGGTCLPENGNCVCAPGFRGPSCQRSCQPGRYGKRCVPCKCANHSFCHPSNGTCYCLAGWTGPDCSQPCPPGHWGENCAQTCQCHHGGTCHPQDGSCICPLGWTGHHCLEGCPLGTFGANCSQPCQCGPGEKCHPETGACVCPPGHSGAPCRIGIQEPFTVMPTTPVAYNSLGAVIGIAVLGSLVVALVALFIGYRHWQKGKEHHHLAVAYSSGRLDGSEYVMPDVPPSYSHYYSNPSYHTLSQCSPNPPPPNKVPGPLFASLQNPERPGGAQGHDNHTTLPADWKHRREPPPGPLDRGSSRLDRSYSYSYSNGPGPFYNKGLISEEELGASVASLSSENPYATIRDLPSLPGGPRESSYMEMKGPPSGSPPRQPPQFWDSQRRRQPQPQRDSGTYEQPSPLIHDRDSVGSQPPLPPGLPPGHYDSPKNSHIPGHYDLPPVRHPPSPPLRRQDR

SEQ ID NO: 204 - protein, 248 aa, Homo sapiens [sequence omitted]

SEQ ID NO: 205 - protein, 216 aa, Homo sapiens
MERASLIQKAKLAEQAERYEDMAAFMKGAVEKGEELSCEERNLLSVAYKNVVGGQRAAWRVLSSIEQKSNEEGSEEKGPEVREYRVFYLKMKGDYYRYLAEVATGDDKKRIIDSARSAYQEAMDISKKEMPPTNPIRLGLALNFSVFHYEIANSPEEAISLAKTTFDEAMADLHTLSEDSYKDSTLIMQLLRDNLTLWTADNAGEEGGEAPQEPQS

SEQ ID NO: 206 - protein, 375 aa, Homo sapiens
MERASCLLLLLLPLVHVSATTPEPCELDDEDFRCVCNFSEPQPDWSEAFQCVSAVEVEIHAGGLNLEPFLKRVDADADPRQYADTVKALRVRRLTVGAAQVPAQLLVGALRVLAYSRLKELTLEDLKITGTMPPLPLEATGLALSSLRLRNVSWATGRSWLAELQQWLKPGLKVLSIAQAHSPAFSCEQVRAFPALTSLDLSDNPGLGERGLMAALCPHKFPAIQNLALRNTGMETPTGVCAALAAAGVQPHSLDLSHNSLRATVNPSAPRCMWSSALNSLNLSFAGLEQVPKGLPAKLRVLDLSCNRLNRAPQPDELPEVDNLTLDGNPFLVPGTALPHEGSMNSGVVPACARSTLSVGVSGTLVLLQGARGFA

SEQ ID NO: 207 - protein, 575 aa, Homo sapiens
MQSPWKILTVAPLFLLLSLQSSASPANDDQSRPSLSNGHTCVGCVLVVSVIEQLAQVHNSTVQASMERLCSYLPEKLFLKTTCYLVIDKFGSDIIKLLSADMNADVVCHTLEFCKQNTGQPLCHLYPLPKETWKFTLQKARQIVKKSPILKYSRSGSDICSLPVLAKICQKIKLAMEQSVPFKDVDSDKYSVFPTLRGYHWRGRDCNDSDESVYPGRRPNNWDVHQDSNCNGIWGVDPKDGVPYEKKFCEGSQPRGIILLGDSAGAHFHISPEWITASQMSLNSFINLPTALTNELDWPQLSGATGFLDSTVGIKEKSIYLRLWKRNHCNHRDYQNISRNGASSRNLKKFIESLSRNKVLDYPAIVIYAMIGNDVCSGKSDPVPAMTTPEKLYSNVMQTLKHLNSHLPNGSHVILYGLPDGTFLWDNLHNRYHPLGQLNKDMTYAQLYSFLNCLQVSPCHGWMSSNKTLRTLTSERAEQLSNTLKKIAASEKFTNFNLFYMDFAFHEIIQEWQKRGGQPWQLIEPVDGFHPNEVALLLLADHFWKKVQLQWPQILGKENPFNPQIKQVFGDQGGH

SEQ ID NO: 208 - protein, 543 aa, Homo sapiens
MQSPWKILTVAPLFLLLSLQSSASPANDDQSRPSLSNGHTCVEKLFLKTTCYLVIDKFGSDIIKLLSADMNADVVCHTLEFCKQNTGQPLCHLYPLPKETWKFTLQKARQIVKKSPILKYSRSGSDICSLPVLAKICQKIKLAMEQSVPFKDVDSDKYSVFPTLRGYHWRGRDCNDSDESVYPGRRPNNWDVHQDSNCNGIWGVDPKDGVPYEKKFCEGSQPRGIILLGDSAGAHFHISPEWITASQMSLNSFINLPTALTNELDWPQLSGATGFLDSTVGIKEKSIYLRLWKRNHCNHRDYQNISRNGASSRNLKKFIESLSRNKVLDYPAIVIYAMIGNDVCSGKSDPVPAMTTPEKLYSNVMQTLKHLNSHLPNGSHVILYGLPDGTFLWDNLHNRYHPLGQLNKDMTYAQLYSFLNCLQVSPCHGWMSSNKTLRTLTSERAEQLSNTLKKIAASEKFTNFNLFYMDFAFHEIIQEWQKRGGQPWQLIEPVDGFHPNEVALLLLADHFWKKVQLQWPQILGKENPFNPQIKQVFGDQGGH

SEQ ID NO: 209 - protein, 339 aa, Mus musculus
MRNPGGPGWASKRPLQKKQNTACLCAQQPARHFVPAPFNSSRQGKNTAQPTEPSLSSVIAPTLFCAFLYLACVTAELPEVSRRMATSGVRSKEGRREHAFVPEPFTGTNLAPSLWLHRFEVIDDLNHWDHATKLRFLKESLKGDALDVYNGLSSQAQGDFSFVKQALLRAFGAPGEAFSEPEEILFANSMGKGYYLKGKVGHVPVRFLVDSGAQVSVVHPALWEEVTDGDLDTLRPFNNVVKVANGAEMKILGVWDTEISLGKTKLKAEFLVANASAEEAIIGTDVLQDHNAVLDFEHRTCTLKGKKFRLLPVGSSLEDEFDLELIEEEEGSSAPEGSH

SEQ ID NO: 210 - protein, 534 aa, Homo sapiens
MFSWVSKDARRKKEPELFQTVAEGLRQLYAQKLLPLEEHYRFHEFHSPALEDADFDNKPMVLLVGQYSTGKTTFIRHLIEQDFPGMRIGPEPTTDSFIAVMHGPTEGVVPGNALVVDPRRPFRKLNAFGNAFLNRFMCAQLPNPVLDSISIIDTPGILSGEKQRISRGYDFAAVLEWFAERVDRIILLFDAHKLDISDEFSEVIKALKNHEDKIRVVLNKADQIETQQLMRVYGALMWSLGKIINTPEVVRVYIGSFWSHPLLIPDNRKLFEAEEQDLFKDIQSLPRNAALRKLNDLIKRARLAKVHAYIISSLKKEMPNVFGKESKKKELVNNLGEIYQKIEREHQISPGDFPSLRKMQELLQTQDFSKFQALKPKLLDTVDDMLANDIARLMVMVRQEESLMPSQVVKGGAFDGTMNGPFGHGYGEGAGEGIDDVEWVVGKDKPTYDEIFYTLSPVNGKITGANAKKEMVKSKLPNTVLGKIWKLADVDKDGLLDDEEFALANHLIKVKLEGHELPADLPPHLVPPSKRRHE

SEQ ID NO: 211 - protein, 200 aa, Mus musculus
MALSVMCLGLALLGVLQSQAQDSTQNLIPAPSLLTVPLQPDFRSDQFRGRWYVVGLAGNAVQKKTEGSFTMYSTIYELQENNSYNVTSILVRDQDQGCRYWIRTFVPSSRAGQFTLGNMHRYPQVQSYNVQVATTDYNQFAMVFFRKTSENKQYFKITLYGRTKELSPELKERFTRFAKSLGLKDDNIIFSVPTDQCIDN

SEQ ID NO: 212 - protein, 331 aa, Homo sapiens
MRGYLVAIFLSAVFLYYVLHCILWGTNVYWVAPVEMKRRNKIQPCLSKPAFASLLRFHQFHPFLCAADFRKIASLYGSDKFDLPYGMRTSAEYFRLALSKLQSCDLFDEFDNIPCKKCVVVGNGGVLKNKTLGEKIDSYDVIIRMNNGPVLGHEEEVGRRTTFRLFYPESVFSDPIHNDPNTTVILTAFKPHDLRWLLELLMGDKINTNGFWKKPALNLIYKPYQIRILDPFIIRTAAYELLHFPKVFPKNQKPKHPTTGIIAITLAFYICHEVHLAGFKYNFSDLKSPLHYYGNATMSLMNKNAYHNVTAEQLFLKDIIEKNLVINLTQD

SEQ ID NO: 213 - protein, 213 aa, Homo sapiens
MRTSAEYFRLALSKLQSCDLFDEFDKMNNGPVLGHEEEVGRRTTFRLFYPESVFSDPIHNDPNTTVILTAFKPHDLRWLLELLMGDKINTNGFWKKPALNLIYKPYQIRILDPFIIRTAAYELLHFPKVFPKNQKPKHPTTGIIAITLAFYICHEVHLAGFKYNFSDLKSPLHYYGNATMSLMNKNAYHNVTAEQLFLKDIIEKNLVINLTQD

SEQ ID NO: 214 - protein, 465 aa, Homo sapiens
MEEEDEEARALLAGGPDEADRGAPAAPGALPALCDPSRLAHRLLVLLLMCFLGFGSYFCYDNPAALQTQVKRDMQVNTTKFMLLYAWYSWPNVVLCFFGGFLIDRVFGIRWGTIIFSCFVCIGQVVFALGGIFNAFWLMEFGRFVFGIGGESLAVAQNTYAVSWFKGKELNLVFGLQLSMARIGSTVNMNLMGWLYSKIEALLGSAGHTTLGITLMIGGITCILSLICALALAYLDQRAERILHKEQGKTGEVIKLTDVKDFSLPLWLIFIICVCYYVAVFPFIGLGKVFFTEKFGFSSQAASAINSVVYVISAPMSPVFGLLVDKTGKNIIWVLCAVAATLVSHMMLAFTMWNPWIAMCLLGLSYSLLACALWPMVAFVVPEHQLGTAYGFMQSIQNLGLAIISIIAGMILDSRGYLFLEVFFIACVSLSLLSVVLLYLVNRAQGGNLNYSARQREEIKFSHTE

SEQ ID NO: 215 - protein, 78 aa, Homo sapiens
MEEEDEEARALLAGGPDEADRGAPAAPGALPALCDPSRLAHRLLVLLLMCFLGFGSYFCYDNPAALQTQVKRMGHNHF

SEQ ID NO: 216 - protein, 426 aa, Homo sapiens
MEEEDEEARALLAGGPDEADRGAPAAPGALPALCDPSRLAHRLLVLLLMCFLGFAIFAMIILLPFRLKLDEWGTIIFSCFVCIGQVVFALGGIFNAFWLMEFGRFVFGIGGESLAVAQNTYAVSWFKGKELNLVFGLQLSMARIGSTVNMNLMGWLYSKIEALLGSAGHTTLGITLMIGGITCILSLICALALAYLDQRAERILHKEQGKTGEVIKLTDVKDFSLPLWLIFIICVCYYVAVFPFIGLGKVFFTEKFGFSSQAASAINSVVYVISAPMSPVFGLLVDKTGKNIIWVLCAVAATLVSHMMLAFTMWNPWIAMCLLGLSYSLLACALWPMVAFVVPEHQLGTAYGFMQSIQNLGLAIISIIAGMILDSRGYLFLEVFFIACVSLSLLSVVLLYLVNRAQGGNLNYSARQREEIKFSHTE

SEQ ID NO: 217 - protein, 392 aa, Homo sapiens
MQVNTTKFMLLYAWYSWPNVVLCFFGGFLIDRVFGIRWGTIIFSCFVCIGQVVFALGGIFNAFWLMEFGRFVFGIGGESLAVAQNTYAVSWFKGKELNLVFGLQLSMARIGSTVNMNLMGWLYSKIEALLGSAGHTTLGITLMIGGITCILSLICALALAYLDQRAERILHKEQGKTGEVIKLTDVKDFSLPLWLIFIICVCYYVAVFPFIGLGKVFFTEKFGFSSQAASAINSVVYVISAPMSPVFGLLVDKTGKNIIWVLCAVAATLVSHMMLAFTMWNPWIAMCLLGLSYSLLACALWPMVAFVVPEHQLGTAYGFMQSIQNLGLAIISIIAGMILDSRGYLFLEVFFIACVSLSLLSVVLLYLVNRAQGGNLNYSARQREEIKFSHTE

SEQ ID NO: 218 - protein, 475 aa, Homo sapiens
MGVALRDLPGRHVSSRSHVTAVLTVFHGRCFLPGFGVVTTFPSPSPAGAMEEEDEEARALLAGGPDEADRGAPAAPGALPALCDPSRLAHRLLVLLLMCFLGFAIFAMIILLPFRLKLNEWGTIIFSCFVCIGQVVFALGGIFNAFWLMEFGRFVFGIGGESLAVAQNTYAVSWFKGKELNLVFGLQLSMARIGSTVNMNLMGWLYSKIEALLGSAGHTTLGITLMIGGITCILSLICALALAYLDQRAERILHKEQGKTGEVIKLTDVKDFSLPLWLIFIICVCYYVAVFPFIGLGKVFFTEKFGFSSQAASAINSVVYVISAPMSPVFGLLVDKTGKNIIWVLCAVAATLVSHMMLAFTMWNPWIAMCLLGLSYSLLACALWPMVAFVVPEHQLGTAYGFMQSIQNLGLAIISIIAGMILDSRGYLFLEVFFIACVSLSLLSVVLLYLVNRAQGGNLNYSARQREEIKFSHTE

SEQ ID NO: 219 - protein, 514 aa, Homo sapiens
MGVALRDLPGRHVSSRSHVTAVLTVFHGRCFLPGFGVVTTFPSPSPAGAMEEEDEEARALLAGGPDEADRGAPAAPGALPALCDPSRLAHRLLVLLLMCFLGFGSYFCYDNPAALQTQVKRDMQVNTTKFMLLYAWYSWPNVVLCFFGGFLIDRVFGIRWGTIIFSCFVCIGQVVFALGGIFNAFWLMEFGRFVFGIGGESLAVAQNTYAVSWFKGKELNLVFGLQLSMARIGSTVNMNLMGWLYSKIEALLGSAGHTTLGITLMIGGITCILSLICALALAYLDQRAERILHKEQGKTGEVIKLTDVKDFSLPLWLIFIICVCYYVAVFPFIGLGKVFFTEKFGFSSQAASAINSVVYVISAPMSPVFGLLVDKTGKNIIWVLCAVAATLVSHMMLAFTMWNPWIAMCLLGLSYSLLACALWPMVAFVVPEHQLGTAYGFMQSIQNLGLAIISIIAGMILDSRGYLFLEVFFIACVSLSLLSVVLLYLVNRAQGGNLNYSARQREEIKFSHTE

SEQ ID NO: 220 - protein, 738 aa, Homo sapiens
MQPRWAQGATMWLGVLLTLLLCSSLEGQENSFTINSVDMKSLPDWTVQNGKNLTLQCFADVSTTSHVKPQHQMLFYKDDVLFYNISSMKSTESYFIPEVRIYDSGTYKCTVIVNNKEKTTAEYQVLVEGVPSPRVTLDKKEAIQGGIVRVNCSVPEEKAPIHFTIEKLELNEKMVKLKREKNSRDQNFVILEFPVEEQDRVLSFRCQARIISGIHMQTSESTKSELVTVTESFSTPKFHISPTGMIMEGAQLHIKCTIQVTHLAQEFPEIIIQKDKAIVAHNRHGNKAVYSVMAMVEHSGNYTCKVESSRISKVSSIVVNITELFSKPELESSFTHLDQGERLNLSCSIPGAPPANFTIQKEDTIVSQTQDFTKIASKSDSGTYICTAGIDKVVKKSNTVQIVVCEMLSQPRISYDAQFEVIKGQTIEVRCESISGTLPISYQLLKTSKVLENSTKNSNDPAVFKDNPTEDVEYQCVADNCHSHAKMLSEVLRVKVIAPVDEVQISILSSKVVESGEDIVLQCAVNEGSGPITYKFYREKEGKPFYQMTSNATQAFWTKQKASKEQEGEYYCTAFNRANHASSVPRSKILTVRVILAPWKKGLIAVVIIGVIIALLIIAAKCYFLRKAKAKQMPVEMSRPAVPLLNSNNEKMSDPNMEANSHYGHNDDVRNHAMKPINDNKEPLNSDVQYTEVQVSSAESHKDLGKKDTETVYSEVRKAVPDAVESRYSRTEGSLDGT

SEQ ID NO: 221 - protein, 720 aa, Homo sapiens
MQPRWAQGATMWLGVLLTLLLCSSLEGQENSFTINSVDMKSLPDWTVQNGKNLTLQCFADVSTTSHVKPQHQMLFYKDDVLFYNISSMKSTESYFIPEVRIYDSGTYKCTVIVNNKEKTTAEYQVLVEGVPSPRVTLDKKEAIQGGIVRVNCSVPEEKAPIHFTIEKLELNEKMVKLKREKNSRDQNFVILEFPVEEQDRVLSFRCQARIISGIHMQTSESTKSELVTVTESFSTPKFHISPTGMIMEGAQLHIKCTIQVTHLAQEFPEIIIQKDKAIVAHNRHGNKAVYSVMAMVEHSGNYTCKVESSRISKVSSIVVNITELFSKPELESSFTHLDQGERLNLSCSIPGAPPANFTIQKEDTIVSQTQDFTKIASKSDSGTYICTAGIDKVVKKSNTVQIVVCEMLSQPRISYDAQFEVIKGQTIEVRCESISGTLPISYQLLKTSKVLENSTKNSNDPAVFKDNPTEDVEYQCVADNCHSHAKMLSEVLRVKVIAPVDEVQISILSSKVVESGEDIVLQCAVNEGSGPITYKFYREKEGKPFYQMTSNATQAFWTKQKASKEQEGEYYCTAFNRANHASSVPRSKILTVRVILAPWKKGLIAVVIIGVIIALLIIAAKCYFLRKAKAKQMPVEMSRPAVPLLNSNNEKMSDPNMEANSHYEPLNSDVQYTEVQVSSAESHKDLGKKDTETVYSEVRKAVPDAVESRYSRTEGSLDGT

SEQ ID NO: 222 - protein, 717 aa, Homo sapiens
MQPRWAQGATMWLGVLLTLLLCSSLEGQENSFTINSVDMKSLPDWTVQNGKNLTLQCFADVSTTSHVKPQHQMLFYKDDVLFYNISSMKSTESYFIPEVRIYDSGTYKCTVIVNNKEKTTAEYQVLVEGVPSPRVTLDKKEAIQGGIVRVNCSVPEEKAPIHFTIEKLELNEKMVKLKREKNSRDQNFVILEFPVEEQDRVLSFRCQARIISGIHMQTSESTKSELVTVTESFSTPKFHISPTGMIMEGAQLHIKCTIQVTHLAQEFPEIIIQKDKAIVAHNRHGNKAVYSVMAMVEHSGNYTCKVESSRISKVSSIVVNITELFSKPELESSFTHLDQGERLNLSCSIPGAPPANFTIQKEDTIVSQTQDFTKIASKSDSGTYICTAGIDKVVKKSNTVQIVVCEMLSQPRISYDAQFEVIKGQTIEVRCESISGTLPISYQLLKTSKVLENSTKNSNDPAVFKDNPTEDVEYQCVADNCHSHAKMLSEVLRVKVIAPVDEVQISILSSKVVESGEDIVLQCAVNEGSGPITYKFYREKEGKPFYQMTSNATQAFWTKQKASKEQEGEYYCTAFNRANHASSVPRSKILTVRVILAPWKKGLIAVVIIGVIIALLIIAAKCYFLRKAKAKQMPVEMSRPAVPLLNSNNEKMSDPNMEANSHYGHNDDVRNHAMKPINDNKDLGKKDTETVYSEVRKAVPDAVESRYSRTEGSLDGT

SEQ ID NO: 223 - protein, 719 aa, Homo sapiens
MQPRWAQGATMWLGVLLTLLLCSSLEGQENSFTINSVDMKSLPDWTVQNGKNLTLQCFADVSTTSHVKPQHQMLFYKDDVLFYNISSMKSTESYFIPEVRIYDSGTYKCTVIVNNKEKTTAEYQVLVEGVPSPRVTLDKKEAIQGGIVRVNCSVPEEKAPIHFTIEKLELNEKMVKLKREKNSRDQNFVILEFPVEEQDRVLSFRCQARIISGIHMQTSESTKSELVTVTESFSTPKFHISPTGMIMEGAQLHIKCTIQVTHLAQEFPEIIIQKDKAIVAHNRHGNKAVYSVMAMVEHSGNYTCKVESSRISKVSSIVVNITELFSKPELESSFTHLDQGERLNLSCSIPGAPPANFTIQKEDTIVSQTQDFTKIASKSDSGTYICTAGIDKVVKKSNTVQIVVCEMLSQPRISYDAQFEVIKGQTIEVRCESISGTLPISYQLLKTSKVLENSTKNSNDPAVFKDNPTEDVEYQCVADNCHSHAKMLSEVLRVKVIAPVDEVQISILSSKVVESGEDIVLQCAVNEGSGPITYKFYREKEGKPFYQMTSNATQAFWTKQKASKEQEGEYYCTAFNRANHASSVPRSKILTVRVILAPWKKGLIAVVIIGVIIALLIIAAKCYFLRKAKAKQMPVEMSRPAVPLLNSNNEKMSDPNMEANSHYGHNDDVRNHAMKPINDNKEPLNSDVQYTEVQVSSAESHKDAVESRYSRTEGSLDGT

SEQ ID NO: 224 - protein, 708 aa, Homo sapiens
MQPRWAQGATMWLGVLLTLLLCSSLEGQENSFTINSVDMKSLPDWTVQNGKNLTLQCFADVSTTSHVKPQHQMLFYKDDVLFYNISSMKSTESYFIPEVRIYDSGTYKCTVIVNNKEKTTAEYQVLVEGVPSPRVTLDKKEAIQGGIVRVNCSVPEEKAPIHFTIEKLELNEKMVKLKREKNSRDQNFVILEFPVEEQDRVLSFRCQARIISGIHMQTSESTKSELVTVTESFSTPKFHISPTGMIMEGAQLHIKCTIQVTHLAQEFPEIIIQKDKAIVAHNRHGNKAVYSVMAMVEHSGNYTCKVESSRISKVSSIVVNITELFSKPELESSFTHLDQGERLNLSCSIPGAPPANFTIQKEDTIVSQTQDFTKIASKSDSGTYICTAGIDKVVKKSNTVQIVVCEMLSQPRISYDAQFEVIKGQTIEVRCESISGTLPISYQLLKTSKVLENSTKNSNDPAVFKDNPTEDVEYQCVADNCHSHAKMLSEVLRVKVIAPVDEVQISILSSKVVESGEDIVLQCAVNEGSGPITYKFYREKEGKPFYQMTSNATQAFWTKQKASKEQEGEYYCTAFNRANHASSVPRSKILTVRVILAPWKKGLIAVVIIGVIIALLIIAAKCYFLRKAKAKQMPVEMSRPAVPLLNSNNEKMSDPNMEANSHYGHNDDVRNHAMKPINDNKEPLNSDVQYTEVQVSSAESHKENGRLP

SEQ ID NO: 225 - protein, 727 aa, Homo sapiens
MQPRWAQGATMWLGVLLTLLLCSSLEGQENSFTINSVDMKSLPDWTVQNGKNLTLQCFADVSTTSHVKPQHQMLFYKDDVLFYNISSMKSTESYFIPEVRIYDSGTYKCTVIVNNKEKTTAEYQVLVEGVPSPRVTLDKKEAIQGGIVRVNCSVPEEKAPIHFTIEKLELNEKMVKLKREKNSRDQNFVILEFPVEEQDRVLSFRCQARIISGIHMQTSESTKSELVTVTESFSTPKFHISPTGMIMEGAQLHIKCTIQVTHLAQEFPEIIIQKDKAIVAHNRHGNKAVYSVMAMVEHSGNYTCKVESSRISKVSSIVVNITELFSKPELESSFTHLDQGERLNLSCSIPGAPPANFTIQKEDTIVSQTQDFTKIASKSDSGTYICTAGIDKVVKKSNTVQIVVCEMLSQPRISYDAQFEVIKGQTIEVRCESISGTLPISYQLLKTSKVLENSTKNSNDPAVFKDNPTEDVEYQCVADNCHSHAKMLSEVLRVKVIAPVDEVQISILSSKVVESGEDIVLQCAVNEGSGPITYKFYREKEGKPFYQMTSNATQAFWTKQKASKEQEGEYYCTAFNRANHASSVPRSKILTVRVILAPWKKGLIAVVIIGVIIALLIIAAKCYFLRKAKAKQMPVEMSRPAVPLLNSNNEKMSDPNMEANSHYGHNDDVRNHAMKPINDNKEPLNSDVQYTEVQVSSAESHKDLGKKDTETVYSEVRKAVPENGRLP

SEQ ID NO: 226 - protein, 390 aa, Homo sapiens
MISLPGPLVTNLLRFLFLGLSALAPPSRAQLQLHLPANRLQAVEGGEVVLPAWYTLHGEVSSSQPWEVPFVMWFFKQKEKEDQVLSYINGVTTSKPGVSLVYSMPSRNLSLRLEGLQEKDSGPYSCSVNVQDKQGKSRGHSIKTLELNVLVPPAPPSCRLQGVPHVGANVTLSCQSPRSKPAVQYQWDRQLPSFQTFFAPALDVIRGSLSLTNLSSSMAGVYVCKAHNEVGTAQCNVTLEVSTGPGAAVVAGAVVGTLVGLGLLAGLVLLYHRRGKALEEPANDIKEDAIAPRTLPWPKSSDTISKNGTLSSVTSARALRPPHGPPRPGALTPTPSLSSQALPSPRLPTTDGAHPQPISPIPGGVSSSGLSRMGAVPVMVPAQSQAGSLV

SEQ ID NO: 227 - protein, 141 aa, Homo sapiens
MISLPGPLVTNLLRFLFLGLSALDVIRGSLSLTNLSSSMAGVYVCKAHNEVGTAQCNVTLEVSTGPGAAVVAGAVVGTLVGLGLLAGLVLLYHRRGKALEEPANDIKVRSPLGLSFSAPKMEWLWKWRDAHFYRDSYLSKW

SEQ ID NO: 228 - protein, 599 aa, Homo sapiens
MKLLKLTGFIFFLFFLTESLTLPTQPRDIENFNSTQKFIEDNIEYITIIAFAQYVQEATFEEMEKLVKDMVEYKDRCMADKTLPECSKLPNNVLQEKICAMEGLPQKHNFSHCCSKVDAQRRLCFFYNKKSDVGFLPPFPTLDPEEKCQAYESNRESLLNHFLYEVARRNPFVFAPTLLTVAVHFEEVAKSCCEEQNKVNCLQTRAIPVTQYLKAFSSYQKHVCGALLKFGTKVVHFIYIAILSQKFPKIEFKELISLVEDVSSNYDGCCEGDVVQCIRDTSKVMNHICSKQDSISSKIKECCEKKIPERGQCIINSNKDDRPKDLSLREGKFTDSENVCQERDADPDTFFAKFTFEYSRRHPDLSIPELLRIVQIYKDLLRNCCNTENPPGCYRYAEDKFNETTEKSLKMVQQECKHFQNLGKDGLKYHYLIRLTKIAPQLSTEELVSLGEKMVTAFTTCCTLSEEFACVDNLADLVFGELCGVNENRTINPAVDHCCKTNFAFRRPCFESLKADKTYVPPPFSQDLFTFHADMCQSQNEELQRKTDRFLVNLVKLKHELTDEELQSLFTNFANVVDKCCKAESPEVCFNEESPKIGN

SEQ ID NO: 229 - protein, 223 aa, Homo sapiens
MNKPLLWISVLTSLLEAFAHTDLSGKVFVFPRESVTDHVNLITPLEKPLQNFTLCFRAYSDLSRAYSLFSYNTQGRDNELLVYKERVGEYSLYIGRHKVTSKVIEKFPAPVHICVSWESSSGIAEFWINGTPLVKKGLRQGYFVEAQPKIVLGQEQDSYGGKFDRSQSFVGEIGDLYMWDSVLPPENILSAYQGTPLPANILDWQALNYEIRGYVIIKPLVWV

SEQ ID NO: 230 - protein, 615 aa, Homo sapiens
MRALLLLGFLLVSLESTLSIPPWEAPKEHKYKAEEHTVVLTVTGEPCHFPFQYHRQLYHKCTHKGRPGPQPWCATTPNFDQDQRWGYCLEPKKVKDHCSKHSPCQKGGTCVNMPSGPHCLCPQHLTGNHCQKEKCFEPQLLRFFHKNEIWYRTEQAAVARCQCKGPDAHCQRLASQACRTNPCLHGGRCLEVEGHRLCHCPVGYTGAFCDVDTKASCYDGRGLSYRGLARTTLSGAPCQPWASEATYRNVTAEQARNWGLGGHAFCRNPDNDIRPWCFVLNRDRLSWEYCDLAQCQTPTQAAPPTPVSPRLHVPLMPAQPAPPKPQPTTRTPPQSQTPGALPAKREQPPSLTRNGPLSCGQRLRKSLSSMTRVVGGLVALRGAHPYIAALYWGHSFCAGSLIAPCWVLTAAHCLQDRPAPEDLTVVLGQERRNHSCEPCQTLAVRSYRLHEAFSPVSYQHDLALLRLQEDADGSCALLSPYVQPVCLPSGAARPSETTLCQVAGWGHQFEGAEEYASFLQEAQVPFLSLERCSAPDVHGSSILPGMLCAGFLEGGTDACQGDSGGPLVCEDQAAERRLTLQGIISWGSGCGDRNKPGVYTDVAYYLAWIREHTVS

SEQ ID NO: 231 - protein, 217 aa, Homo sapiens
MAYPGYGGGFGNFSIQVPGMQMGQPVPETGPAILLDGYSGPAYSDTYSSAGDSVYTYFSAVAGQDGEVDAEELQRCLTQSGINGTYSPFSLETCRIMIAMLDRDHTGKMGFNAFKELWAALNAWKENFMTVDQDGSGTVEHHELRQAIGLMGYRLSPQTLTTIVKRYSKNGRIFFDDYVACCVKLRALTDFFRKRDHLQQGSANFIYDDFLQGTMAI

SEQ ID NO: 232 - protein, 313 aa, Homo sapiens
MAARRALHFVFKVGNRFQTARFYRDVLGMKVESCSVARLECSGAISAHCSDYTRITEDSFSKPYDGKWSKTMVGFGPEDDHFVAELTYNYGVGDYKLGNDFMGITLASSQAVSNARKLEWPLTEVAEGVFETEAPGGYKFYLQNRSLPQSDPVLKVTLAVSDLQKSLNYWCNLLGMKIYEKDEEKQRALLGYADNQCKLELQGVKGGVDHAAAFGRIAFSCPQKELPDLEDLMKRENQKILTPLVSLDTPGKATVQVVILADPDGHEICFVGDEAFRELSKMDPEGSKLLDDAMAADKSDEWFAKHNKPKASG

SEQ ID NO: 233 - protein, 298 aa, Homo sapiens
MAARRALHFVFKVGNRFQTARFYRDVLGMKVLRHEEFEEGCKAACNGPYDGKWSKTMVGFGPEDDHFVAELTYNYGVGDYKLGNDFMGITLASSQAVSNARKLEWPLTEVAEGVFETEAPGGYKFYLQNRSLPQSDPVLKVTLAVSDLQKSLNYWCNLLGMKIYEKDEEKQRALLGYADNQCKLELQGVKGGVDHAAAFGRIAFSCPQKELPDLEDLMKRENQKILTPLVSLDTPGKATVQVVILADPDGHEICFVGDEAFRELSKMDPEGSKLLDDAMAADKSDEWFAKHNKPKASG

SEQ ID NO: 234 - protein, 188 aa, Homo sapiens
MAARRALHFVFKVGNRFQTARFYRDVLGMKVLRHEEFEEGCKAACNGPYDGKWSKTMVGFGPEDDHFVAELTYNYGVGDYKLGNDFMGITLASSQAVSNARKLEWPLTEVAEGVFETEAPGGYKFYLQNRSLPQSDPVLKVTLAVSDLQKSLNYWCNLLGMKIYEKDEEKQRALLGYADNQVSNLGEE

SEQ ID NO: 235 - protein, 560 aa, Homo sapiens
MLRGTLLCAVLGLLRAQPFPCPPACKCVFRDAAQCSGGDVARISALGLPTNLTHILLFGMGRGVLQSQSFSGMTVLQRLMISDSHISAVAPGTFSDLIKLKTLRLSRNKITHLPGALLDKMVLLEQLFLDHNALRGIDQNMFQKLVNLQELALNQNQLDFLPASLFTNLENLKLLDLSGNNLTHLPKGLLGAQAKLERLLLHSNRLVSLDSGLLNSLGALTELQFHRNHIRSIAPGAFDRLPNLSSLTLSRNHLAFLPSALFLHSHNLTLLTLFENPLAELPGVLFGEMGGLQELWLNRTQLRTLPAAAFRNLSRLRYLGVTLSPRLSALPQGAFQGLGELQVLALHSNGLTALPDGLLRGLGKLRQVSLRRNRLRALPRALFRNLSSLESVQLDHNQLETLPGDVFGALPRLTEVLLGHNSWRCDCGLGPFLGWLRQHLGLVGGEEPPRCAGPGAHAGLPLWALPGGDAECPGPRGPPPRPAADSSSEAPVHPALAPNSSEPWVWAQPVTTGKGQDHSPFWGFYFLLLAVQAMITVIIVFAMIKIGQLFRKLIRERALG

SEQ ID NO: 236 - protein, 655 aa, Homo sapiens
MGRWAWVPSPWPPPGLGPFLLLLLLLLLLPRGFQPQPGGNRTESPEPNATATPAIPTILVTSVTSETPATSAPEAEGPQSGGLPPPPRAVPSSSSPQAQALTEDGRPCRFPFRYGGRMLHACTSEGSAHRKWCATTHNYDRDRAWGYCVEATPPPGGPAALDPCASGPCLNGGSCSNTQDPQSYHCSCPRAFTGKDCGTEKCFDETRYEYLEGGDRWARVRQGHVEQCECFGGRTWCEGTRHTACLSSPCLNGGTCHLIVATGTTVCACPPGFAGRLCNIEPDERCFLGNGTGYRGVASTSASGLSCLAWNSDLLYQELHVDSVGAAALLGLGPHAYCRNPDNDERPWCYVVKDSALSWEYCRLEACESLTRVQLSPDLLATLPEPASPGRQACGRRHKKRTFLRPRIIGGSSSLPGSHPWLAAIYIGDSFCAGSLVHTCWVVSAAHCFSHSPPRDSVSVVLGQHFFNRTTDVTQTFGIEKYIPYTLYSVFNPSDHDLVLIRLKKKGDRCATRSQFVQPICLPEPGSTFPAGHKCQIAGWGHLDENVSGYSSSLREALVPLVADHKCSSPEVYGADISPNMLCAGYFDCKSDACQGDSGGPLACEKNGVAYLYGIISWGDGCGRLHKPGVYTRVANYVDWINDRIRPPRRLVAPS

SEQ ID NO: 237 - protein, 195 aa, Homo sapiens
MGKISSLPTQLFKCCFCDFLKVKMHTMSSSHLFYLALCLLTFTSSATAGPETLCGAELVDALQFVCGDRGFYFNKPTGYGSSSRRAPQTGIVDECCFRSCDLRRLEMYCAPLKPAKSARSVRAQRHTDMPKTQKYQPPSTNKNTKSQRRKGWPKTHPGGEQKEGTEASLQIRGKKKEQRREIGSRNAECRGKKGK

SEQ ID NO: 238 - protein, 153 aa, Homo sapiens
MGKISSLPTQLFKCCFCDFLKVKMHTMSSSHLFYLALCLLTFTSSATAGPETLCGAELVDALQFVCGDRGFYFNKPTGYGSSSRRAPQTGIVDECCFRSCDLRRLEMYCAPLKPAKSARSVRAQRHTDMPKTQKEVHLKNASRGSAGNKNYRM

SEQ ID NO: 239 - protein, 137 aa, Homo sapiens
MITPTVKMHTMSSSHLFYLALCLLTFTSSATAGPETLCGAELVDALQFVCGDRGFYFNKPTGYGSSSRRAPQTGIVDECCFRSCDLRRLEMYCAPLKPAKSARSVRAQRHTDMPKTQKEVHLKNASRGSAGNKNYRM

SEQ ID NO: 240 - protein, 158 aa, Homo sapiens
MGKISSLPTQLFKCCFCDFLKVKMHTMSSSHLFYLALCLLTFTSSATAGPETLCGAELVDALQFVCGDRGFYFNKPTGYGSSSRRAPQTGIVDECCFRSCDLRRLEMYCAPLKPAKSARSVRAQRHTDMPKTQKYQPPSTNKNTKSQRRKGSTFEERK

SEQ ID NO: 241 - protein, 949 aa, Homo sapiens
MILSLLFSLGGPLGWGLLGAWAQASSTSLSDLQSSRTPGVWKAEAEDTGKDPVGRNWCPYPMSKLVTLLALCKTEKFLIHSQQPCPQGAPDCQKVKVMYRMAHKPVYQVKQKVLTSLAWRCCPGYTGPNCEHHDSMAIPEPADPGDSHQEPQDGPVSFKPGHLAAVINEVEVQQEQQEHLLGDLQNDVHRVADSLPGLWKALPGNLTAAVMEANQTGHEFPDRSLEQVLLPHVDTFLQVHFSPIWRSFNQSLHSLTQAIRNLSLDVEANRQAISRVQDSAVARADFQELGAKFEAKVQENTQRVGQLRQDVEDRLHAQHFTLHRSISELQADVDTKLKRLHKAQEAPGTNGSLVLATPGAGARPEPDSLQARLGQLQRNLSELHMTTARREEELQYTLEDMRATLTRHVDEIKELYSESDETFDQISKVERQVEELQVNHTALRELRVILMEKSLIMEENKEEVERQLLELNLTLQHLQGGHADLIKYVKDCNCQKLYLDLDVIREGQRDATRALEETQVSLDERRQLDGSSLQALQNAVDAVSLAVDAHKAEGERARAATSRLRSQVQALDDEVGALKAAAAEARHEVRQLHSAFAALLEDALRHEAVLAALFGEEVLEEMSEQTPGPLPLSYEQIRVALQDAASGLQEQALGWDELAARVTALEQASEPPRPAEHLEPSHDAGREEAATTALAGLARELQSLSNDVKNVGRCCEAEAGAGAASLNASLHGLHNALFATQRSLEQHQRLFHSLFGNFQGLMEANVSLDLGKLQTMLSRKGKKQQKDLEAPRKRDKKEAEPLVDIRVTGPVPGALGAALWEAGSPVAFYASFSEGTAALQTVKFNTTYINIGSSYFPEHGYFRAPERGVYLFAVSVEFGPGPGTGQLVFGGHHRTPVCTTGQGSGSTATVFAMAELQKGERVWFELTQGSITKRSLSGTAFGGFLMFKT

SEQ ID NO: 242 - protein, 104 aa, Homo sapiens
MSSAARSRLTRATRQEMLFLALLLLPVVVAFARAEAEEDGDLQCLCVKTTSQVRPRHITSLEVIKAGPHCPTAQLIATLKNGRKICLDLQALLYKKIIKEHLES

SEQ ID NO: 243 - protein, 780 aa, Homo sapiens
MAAVDLEKLRASGAGKAIGVLTSGGDAQGMNAAVRAVTRMGIYVGAKVFLIYEGYEGLVEGGENIKQANWLSVSNIIQLGGTIIGSARCKAFTTREGRRAAAYNLVQHGITNLCVIGGDGSLTGANIFRSEWGSLLEELVAEGKISETTARTYSHLNIAGLVGSIDNDFCGTDMTIGTDSALHRIMEVIDAITTTAQSHQRTFVLEVMGRHCGYLALVSALASGADWLFIPEAPPEDGWENFMCERLGETRSRGSRLNIIIIAEGAIDRNGKPISSSYVKDLVVQRLGFDTRVTVLGHVQRGGTPSAFDRILSSKMGMEAVMALLEATPDTPACVVTLSGNQSVRLPLMECVQMTKEVQKAMDDKRFDEATQLRGGSFENNWNIYKLLAHQKPPKEKSNFSLAILNVGAPAAGMNAAVRSAVRTGISHGHTVYVVHDGFEGLAKGQVQEVGWHDVAGWLGRGGSMLGTKRTLPKGQLESIVENIRIYGIHALLVVGGFEAYEGVLQLVEARGRYEELCIVMCVIPATISNNVPGTDFSLGSDTAVNAAMESCDRIKQSASGTKRRVFIVETMGGYCGYLATVTGIAVGADAAYVFEDPFNIHDLKVNVEHMTEKMKTDIQRGLVLRNEKCHDYYTTEFLYNLYSSEGKGVFDCRTNVLGHLQQGGAPTPFDRNYGTKLGVKAMLWLSEKLREVYRKGRVFANAPDSACVIGLKKKAVAFSPVTELKKDTDFEHRMPREQWWLSLRLMLKMLAQYRISMAAYVSGELEHVTRRTLSMDKGF

SEQ ID NO: 244 - protein, 827 aa, Homo sapiens
MCNQGRGRESSRGGLHVQGSCRGLSRSPQQETGFAKAPAGTDCFFHCSPGSRGQGDRKEEVTSEPGGTSIMSRLGGMNAAVRAVTRMGIYVGAKVFLIYEGYEGLVEGGENIKQANWLSVSNIIQLGGTIIGSARCKAFTTREGRRAAAYNLVQHGITNLCVIGGDGSLTGANIFRSEWGSLLEELVAEGKISETTARTYSHLNIAGLVGSIDNDFCGTDMTIGTDSALHRIMEVIDAITTTAQSHQRTFVLEVMGRHCGYLALVSALASGADWLFIPEAPPEDGWENFMCERLGETRSRGSRLNIIIIAEGAIDRNGKPISSSYVKDLVVQRLGFDTRVTVLGHVQRGGTPSAFDRILSSKMGMEAVMALLEATPDTPACVVTLSGNQSVRLPLMECVQMTKEVQKAMDDKRFDEATQLRGGSFENNWNIYKLLAHQKPPKEKSNFSLAILNVGAPAAGMNAAVRSAVRTGISHGHTVYVVHDGFEGLAKGQVQEVGWHDVAGWLGRGGSMLGTKRTLPKGQLESIVENIRIYGIHALLVVGGFEAYEGVLQLVEARGRYEELCIVMCVIPATISNNVPGTDFSLGSDTAVNAAMESCDRIKQSASGTKRRVFIVETMGGYCGYLATVTGIAVGADAAYVFEDPFNIHDLKVNVEHMTEKMKTDIQRGLVLRNEKCHDYYTTEFLYNLYSSEGKGVFDCRTNVLGHLQQGGAPTPFDRNYGTKLGVKAMLWLSEKLREVYRKGRVFANAPDSACVIGLKKKAVAFSPVTELKKDTDFEHRMPREQWWLSLRLMLKMLAQYRISMAAYVSGELEHVTRRTLSMDKGF

SEQ ID NO: 245 - protein, 836 aa, Homo sapiens
MIPFLPMFSLLLLLIVNPINANNHYDKILAHSRIRGRDQGPNVCALQQILGTKKKYFSTCKNWYKKSICGQKTTVLYECCPGYMRMEGMKGCPAVLPIDHVYGTLGIVGATTTQRYSDASKLREEIEGKGSFTYFAPSNEAWDNLDSDIRRGLESNVNVELLNALHSHMINKRMLTKDLKNGMIIPSMYNNLGLFINHYPNGVVTVNCARIIHGNQIATNGVVHVIDRVLTQIGTSIQDFIEAEDDLSSFRAAAITSDILEALGRDGHFTLFAPTNEAFEKLPRGVLERIMGDKVASEALMKYHILNTLQCSESIMGGAVFETLEGNTIEIGCDGDSITVNGIKMVNKKDIVTNNGVIHLIDQVLIPDSAKQVIELAGKQQTTFTDLVAQLGLASALRPDGEYTLLAPVNNAFSDDTLSMDQRLLKLILQNHILKVKVGLNELYNGQILETIGGKQLRVFVYRTAVCIENSCMEKGSKQGRNGAIHIFREIIKPAEKSLHEKLKQDKRFSTFLSLLEAADLKELLTQPGDWTLFVPTNDAFKGMTSEEKEILIRDKNALQNIILYHLTPGVFIGKGFEPGVTNILKTTQGSKIFLKEVNDTLLVNELKSKESDIMTTNGVIHVVDKLLYPADTPVGNDQLLEILNKLIKYIQIKFVRGSTFKEIPVTVYTTKIITKVVEPKIKVIEGSLQPIIKTEGPTLTKVKIEGEPEFRLIKEGETITEVIHGEPIIKKYTKIIDGVPVEITEKETREERIITGPEIKYTRISTGGGETEETLKKLLQEEVTKVTKFIEGGDGHLFEDEEIKRLLQGDTPVRKLQANKKVQGSRRRLREGRSQ

SEQ ID NO: 246 - protein, 779 aa, Homo sapiens
MIPFLPMFSLLLLLIVNPINANNHYDKILAHSRIRGRDQGPNVCALQQILGTKKKYFSTCKNWYKKSICGQKTTVLYECCPGYMRMEGMKGCPAVLPIDHVYGTLGIVGATTTQRYSDASKLREEIEGKGSFTYFAPSNEAWDNLDSDIRRGLESNVNVELLNALHSHMINKRMLTKDLKNGMIIPSMYNNLGLFINHYPNGVVTVNCARIIHGNQIATNGVVHVIDRVLTQIGTSIQDFIEAEDDLSSFRAAAITSDILEALGRDGHFTLFAPTNEAFEKLPRGVLERIMGDKVASEALMKYHILNTLQCSESIMGGAVFETLEGNTIEIGCDGDSITVNGIKMVNKKDIVTNNGVIHLIDQVLIPDSAKQVIELAGKQQTTFTDLVAQLGLASALRPDGEYTLLAPVNNAFSDDTLSMDQRLLKLILQNHILKVKVGLNELYNGQILETIGGKQLRVFVYRTAVCIENSCMEKGSKQGRNGAIHIFREIIKPAEKSLHEKLKQDKRFSTFLSLLEAADLKELLTQPGDWTLFVPTNDAFKGMTSEEKEILIRDKNALQNIILYHLTPGVFIGKGFEPGVTNILKTTQGSKIFLKEVNDTLLVNELKSKESDIMTTNGVIHVVDKLLYPADTPVGNDQLLEILNKLIKYIQIKFVRGSTFKEIPVTVYKPIIKKYTKIIDGVPVEITEKETREERIITGPEIKYTRISTGGGETEETLKKLLQEEVTKVTKFIEGGDGHLFEDEEIKRLLQGDTPVRKLQANKKVQGSRRRLREGRSQ

SEQ ID NO: 247 - protein, 781 aa, Homo sapiens
MIPFLPMFSLLLLLIVNPINANNHYDKILAHSRIRGRDQGPNVCALQQILGTKKKYFSTCKNWYKKSICGQKTTVLYECCPGYMRMEGMKGCPAVLPIDHVYGTLGIVGATTTQRYSDASKLREEIEGKGSFTYFAPSNEAWDNLDSDIRRGLESNVNVELLNALHSHMINKRMLTKDLKNGMIIPSMYNNLGLFINHYPNGVVTVNCARIIHGNQIATNGVVHVIDRVLTQIGTSIQDFIEAEDDLSSFRAAAITSDILEALGRDGHFTLFAPTNEAFEKLPRGVLERIMGDKVASEALMKYHILNTLQCSESIMGGAVFETLEGNTIEIGCDGDSITVNGIKMVNKKDIVTNNGVIHLIDQVLIPDSAKQVIELAGKQQTTFTDLVAQLGLASALRPDGEYTLLAPVNNAFSDDTLSMDQRLLKLILQNHILKVKVGLNELYNGQILETIGGKQLRVFVYRTAVCIENSCMEKGSKQGRNGAIHIFREIIKPAEKSLHEKLKQDKRFSTFLSLLEAADLKELLTQPGDWTLFVPTNDAFKGMTSEEKEILIRDKNALQNIILYHLTPGVFIGKGFEPGVTNILKTTQGSKIFLKEVNDTLLVNELKSKESDIMTTNGVIHVVDKLLYPADTPVGNDQLLEILNKLIKYIQIKFVRGSTFKEIPVTVYRPTLTKVKIEGEPEFRLIKEGETITEVIHGEPIIKKYTKIIDGVPVEITEKETREERIITGPEIKYTRISTGGGETEETLKKLLQEDTPVRKLQANKKVQGSRRRLREGRSQ

SEQ ID NO: 248 - protein, 751 aa, Homo sapiens
MIPFLPMFSLLLLLIVNPINANNHYDKILAHSRIRGRDQGPNVCALQQILGTKKKYFSTCKNWYKKSICGQKTTVLYECCPGYMRMEGMKGCPAVLPIDHVYGTLGIVGATTTQRYSDASKLREEIEGKGSFTYFAPSNEAWDNLDSDIRRGLESNVNVELLNALHSHMINKRMLTKDLKNGMIIPSMYNNLGLFINHYPNGVVTVNCARIIHGNQIATNGVVHVIDRVLTQIGTSIQDFIEAEDDLSSFRAAAITSDILEALGRDGHFTLFAPTNEAFEKLPRGVLERIMGDKVASEALMKYHILNTLQCSESIMGGAVFETLEGNTIEIGCDGDSITVNGIKMVNKKDIVTNNGVIHLIDQVLIPDSAKQVIELAGKQQTTFTDLVAQLGLASALRPDGEYTLLAPVNNAFSDDTLSMDQRLLKLILQNHILKVKVGLNELYNGQILETIGGKQLRVFVYRTAVCIENSCMEKGSKQGRNGAIHIFREIIKPAEKSLHEKLKQDKRFSTFLSLLEAADLKELLTQPGDWTLFVPTNDAFKGMTSEEKEILIRDKNALQNIILYHLTPGVFIGKGFEPGVTNILKTTQGSKIFLKEVNDTLLVNELKSKESDIMTTNGVIHVVDKLLYPADTPVGNDQLLEILNKLIKYIQIKFVRGSTFKEIPVTVYKPIIKKYTKIIDGVPVEITEKETREERIITGPEIKYTRISTGGGETEETLKKLLQEDTPVRKLQANKKVQGSRRRLREGRSQ

SEQ ID NO: 249 - protein, 809 aa, Homo sapiens
MIPFLPMFSLLLLLIVNPINANNHYDKILAHSRIRGRDQGPNVCALQQILGTKKKYFSTCKNWYKKSICGQKTTVLYECCPGYMRMEGMKGCPAVLPIDHVYGTLGIVGATTTQRYSDASKLREEIEGKGSFTYFAPSNEAWDNLDSDIRRGLESNVNVELLNALHSHMINKRMLTKDLKNGMIIPSMYNNLGLFINHYPNGVVTVNCARIIHGNQIATNGVVHVIDRVLTQIGTSIQDFIEAEDDLSSFRAAAITSDILEALGRDGHFTLFAPTNEAFEKLPRGVLERIMGDKVASEALMKYHILNTLQCSESIMGGAVFETLEGNTIEIGCDGDSITVNGIKMVNKKDIVTNNGVIHLIDQVLIPDSAKQVIELAGKQQTTFTDLVAQLGLASALRPDGEYTLLAPVNNAFSDDTLSMDQRLLKLILQNHILKVKVGLNELYNGQILETIGGKQLRVFVYRTAVCIENSCMEKGSKQGRNGAIHIFREIIKPAEKSLHEKLKQDKRFSTFLSLLEAADLKELLTQPGDWTLFVPTNDAFKGMTSEEKEILIRDKNALQNIILYHLTPGVFIGKGFEPGVTNILKTTQGSKIFLKEVNDTLLVNELKSKESDIMTTNGVIHVVDKLLYPADTPVGNDQLLEILNKLIKYIQIKFVRGSTFKEIPVTVYRPTLTKVKIEGEPEFRLIKEGETITEVIHGEPIIKKYTKIIDGVPVEITEKETREERIITGPEIKYTRISTGGGETEETLKKLLQEEVTKVTKFIEGGDGHLFEDEEIKRLLQGDTPVRKLQANKKVQGSRRRLREGRSQ

SEQ ID NO: 250 - protein, 749 aa, Homo sapiens
MIPFLPMFSLLLLLIVNPINANNHYDKILAHSRIRGRDQGPNVCALQQILGTKKKYFSTCKNWYKKSICGQKTTVLYECCPGYMRMEGMKGCPAVLPIDHVYGTLGIVGATTTQRYSDASKLREEIEGKGSFTYFAPSNEAWDNLDSDIRRGLESNVNVELLNALHSHMINKRMLTKDLKNGMIIPSMYNNLGLFINHYPNGVVTVNCARIIHGNQIATNGVVHVIDRVLTQIGTSIQDFIEAEDDLSSFRAAAITSDILEALGRDGHFTLFAPTNEAFEKLPRGVLERIMGDKVASEALMKYHILNTLQCSESIMGGAVFETLEGNTIEIGCDGDSITVNGIKMVNKKDIVTNNGVIHLIDQVLIPDSAKQVIELAGKQQTTFTDLVAQLGLASALRPDGEYTLLAPVNNAFSDDTLSMDQRLLKLILQNHILKVKVGLNELYNGQILETIGGKQLRVFVYRTAVCIENSCMEKGSKQGRNGAIHIFREIIKPAEKSLHEKLKQDKRFSTFLSLLEAADLKELLTQPGDWTLFVPTNDAFKGMTSEEKEILIRDKNALQNIILYHLTPGVFIGKGFEPGVTNILKTTQGSKIFLKEVNDTLLVNELKSKESDIMTTNGVIHVVDKLLYPADTPVGNDQLLEILNKLIKYIQIKFVRGSTFKEIPVTVYSPEIKYTRISTGGGETEETLKKLLQEEVTKVTKFIEGGDGHLFEDEEIKRLLQGDTPVRKLQANKKVQGSRRRLREGRSQ

SEQ ID NO: 251 - protein, 721 aa, Homo sapiens
MIPFLPMFSLLLLLIVNPINANNHYDKILAHSRIRGRDQGPNVCALQQILGTKKKYFSTCKNWYKKSICGQKTTVLYECCPGYMRMEGMKGCPAVLPIDHVYGTLGIVGATTTQRYSDASKLREEIEGKGSFTYFAPSNEAWDNLDSDIRRGLESNVNVELLNALHSHMINKRMLTKDLKNGMIIPSMYNNLGLFINHYPNGVVTVNCARIIHGNQIATNGVVHVIDRVLTQIGTSIQDFIEAEDDLSSFRAAAITSDILEALGRDGHFTLFAPTNEAFEKLPRGVLERIMGDKVASEALMKYHILNTLQCSESIMGGAVFETLEGNTIEIGCDGDSITVNGIKMVNKKDIVTNNGVIHLIDQVLIPDSAKQVIELAGKQQTTFTDLVAQLGLASALRPDGEYTLLAPVNNAFSDDTLSMDQRLLKLILQNHILKVKVGLNELYNGQILETIGGKQLRVFVYRTAVCIENSCMEKGSKQGRNGAIHIFREIIKPAEKSLHEKLKQDKRFSTFLSLLEAADLKELLTQPGDWTLFVPTNDAFKGMTSEEKEILIRDKNALQNIILYHLTPGVFIGKGFEPGVTNILKTTQGSKIFLKEVNDTLLVNELKSKESDIMTTNGVIHVVDKLLYPADTPVGNDQLLEILNKLIKYIQIKFVRGSTFKEIPVTVYSPEIKYTRISTGGGETEETLKKLLQEDTPVRKLQANKKVQGSRRRLREGRSQ

SEQ ID NO: 252 - protein, 130 aa, Homo sapiens
MRLFTGIVFCSLVMGVTSESWRSFFKEALQGVGDMGRAYWDIMISNHQNSNRYLYARGNYDAAQRGPGGVWAAKLISRSRVYLQGLIDCYLFGNSSTVLEDSKSNEKAEEWGRSGKDPDRFRPDGLPKKY

SEQ ID NO: 253 - protein, 211 aa, Homo sapiens
MTPWLGLIVLLGSWSLGDWGAEACTCSPSHPQDAFCNSDIVIRAKVVGKKLVKEGPFGTLVYTIKQMKMYRGFTKMPHVQYIHTEASESLCGLKLEVNKYQYLLTGRVYDGKMYTGLCNFVERWDQLTLSQRKGLNYRYHLGCNCKIKSCYYLPCFVTSKNECLWTDMLSNFGYPGYQSKHYACIRQKGGYCSWYRGWAPPDKSIINATDP

SEQ ID NO: 254 - protein, 247 aa, Homo sapiens
MVDREQLVQKARLAEQAERYDDMAAAMKNVTELNEPLSNEERNLLSVAYKNVVGARRSSWRVISSIEQKTSADGNEKKIEMVRAYREKIEKELEAVCQDVLSLLDNYLIKNCSETQYESKVFYLKMKGDYYRYLAEVATGEKRATVVESSEKAYSEAHEISKEHMQPTHPIRLGLALNYSVFYYEIQNAPEQACHLAKTAFDDAIAELDTLNEDSYKDSTLIMQLLRDNLTLWTSDQQDDDGGEGNN

SEQ ID NO: 255 - protein, 909 aa, Homo sapiens
MAARPLPVSPARALLLALAGALLAPCEARGVSLWNQGRADEVVSASVGSGDLWIPVKSFDSKNHPEVLNIRLQRESKELIINLERNEGLIASSFTETHYLQDGTDVSLARNYTVILGHCYYHGHVRGYSDSAVSLSTCSGLRGLIVFENESYVLEPMKSATNRYKLFPAKKLKSVRGSCGSHHNTPNLAAKNVFPPPSQTWARRHKRETLKATKYVELVIVADNREFQRQGKDLEKVKQRLIEIANHVDKFYRPLNIRIVLVGVEVWNDMDKCSVSQDPFTSLHEFLDWRKMKLLPRKSHDNAQLVSGVYFQGTTIGMAPIMSMCTADQSGGIVMDHSDNPLGAAVTLAHELGHNFGMNHDTLDRGCSCQMAVEKGGCIMNASTGYPFPMVFSSCSRKDLETSLEKGMGVCLFNLPEVRESFGGQKCGNRFVEEGEECDCGEPEECMNRCCNATTCTLKPDAVCAHGLCCEDCQLKPAGTACRDSSNSCDLPEFCTGASPHCPANVYLHDGHSCQDVDGYCYNGICQTHEQQCVTLWGPGAKPAPGICFERVNSAGDPYGNCGKVSKSSFAKCEMRDAKCGKIQCQGGASRPVIGTNAVSIETNIPLQQGGRILCRGTHVYLGDDMPDPGLVLAGTKCADGKICLNRQCQNISVFGVHECAMQCHGRGVCNNRKNCHCEAHWAPPFCDKFGFGGSTDSGPIRQADNQGLTIGILVTILCLLAAGFVVYLKRKTLIRLLFTNKKTTIEKLRCVRPSRPPRGFQPCQAHLGHLGKGLMRKPPDSYPPKDNPRRLLQCQNVDISRPLNGLNVPQPQSTQRVLPPLHRAPRAPSVPARPLPAKPALRQAQGTCKPNPPQKPLPADPLARTTRLTHALARTPGQWETGLRLAPLRPAPQYPHQVPRSTHTAYIK

SEQ ID NO: 256 - protein, 738 aa, Homo sapiens
MAARPLPVSPARALLLALAGALLAPCEARGVSLWNQGRADEVVSASVGSGDLWIPVKSFDSKNHPEVLNIRLQRESKELIINLERNEGLIASSFTETHYLQDGTDVSLARNYTVILGHCYYHGHVRGYSDSAVSLSTCSGLRGLIVFENESYVLEPMKSATNRYKLFPAKKLKSVRGSCGSHHNTPNLAAKNVFPPPSQTWARRHKRETLKATKYVELVIVADNREFQRQGKDLEKVKQRLIEIANHVDKFYRPLNIRIVLVGVEVWNDMDKCSVSQDPFTSLHEFLDWRKMKLLPRKSHDNAQLVSGVYFQGTTIGMAPIMSMCTADQSGGIVMDHSDNPLGAAVTLAHELGHNFGMNHDTLDRGCSCQMAVEKGGCIMNASTGYPFPMVFSSCSRKDLETSLEKGMGVCLFNLPEVRESFGGQKCGNRFVEEGEECDCGEPEECMNRCCNATTCTLKPDAVCAHGLCCEDCQLKPAGTACRDSSNSCDLPEFCTGASPHCPANVYLHDGHSCQDVDGYCYNGICQTHEQQCVTLWGPGAKPAPGICFERVNSAGDPYGNCGKVSKSSFAKCEMRDAKCGKIQCQGGASRPVIGTNAVSIETNIPLQQGGRILCRGTHVYLGDDMPDPGLVLAGTKCADGKICLNRQCQNISVFGVHECAMQCHGRGVCNNRKNCHCEAHWAPPFCDKFGFGGSTDSGPIRQAEARQEAAESNRERGQGQEPVGSQEHASTASLTLI

SEQ ID NO: 257 - protein, 735 aa, Homo sapiens
MAARPLPVSPARALLLALAGALLAPCEARGVSLWNQGRADEVVSASVGSGDLWIPVKSFDSKNHPEVLNIRLQRESKELIINLERNEGLIASSFTETHYLQDGTDVSLARNYTGHCYYHGHVRGYSDSAVSLSTCSGLRGLIVFENESYVLEPMKSATNRYKLFPAKKLKSVRGSCGSHHNTPNLAAKNVFPPPSQTWARRHKRETLKATKYVELVIVADNREFQRQGKDLEKVKQRLIEIANHVDKFYRPLNIRIVLVGVEVWNDMDKCSVSQDPFTSLHEFLDWRKMKLLPRKSHDNAQLVSGVYFQGTTIGMAPIMSMCTADQSGGIVMDHSDNPLGAAVTLAHELGHNFGMNHDTLDRGCSCQMAVEKGGCIMNASTGYPFPMVFSSCSRKDLETSLEKGMGVCLFNLPEVRESFGGQKCGNRFVEEGEECDCGEPEECMNRCCNATTCTLKPDAVCAHGLCCEDCQLKPAGTACRDSSNSCDLPEFCTGASPHCPANVYLHDGHSCQDVDGYCYNGICQTHEQQCVTLWGPGAKPAPGICFERVNSAGDPYGNCGKVSKSSFAKCEMRDAKCGKIQCQGGASRPVIGTNAVSIETNIPLQQGGRILCRGTHVYLGDDMPDPGLVLAGTKCADGKICLNRQCQNISVFGVHECAMQCHGRGVCNNRKNCHCEAHWAPPFCDKFGFGGSTDSGPIRQAEARQEAAESNRERGQGQEPVGSQEHASTASLTLI

SEQ ID NO: 258 - protein, 737 aa, Homo sapiens
MAARPLPVSPARALLLALAGALLAPCEARGVSLWNQGRADEVVSASVGSGDLWIPVKSFDSKNHPEVLNIRLQRESKELIINLERNEGLIASSFTETHYLQDGTDVSLARNYTGHCYYHGHVRGYSDSAVSLSTCSGLRGLIVFENESYVLEPMKSATNRYKLFPAKKLKSVRGSCGSHHNTPNLAAKNVFPPPSQTWARRHKRETLKATKYVELVIVADNREFQRQGKDLEKVKQRLIEIANHVDKFYRPLNIRIVLVGVEVWNDMDKCSVSQDPFTSLHEFLDWRKMKLLPRKSHDNAQLVSGVYFQGTTIGMAPIMSMCTADQSGGIVMDHSDNPLGAAVTLAHELGHNFGMNHDTLDRGCSCQMAVEKGGCIMNASTGYPFPMVFSSCSRKDLETSLEKGMGVCLFNLPEVRESFGGQKCGNRFVEEGEECDCGEPEECMNRCCNATTCTLKPDAVCAHGLCCEDCQLKPAGTACRDSSNSCDLPEFCTGASPHCPANVYLHDGHSCQDVDGYCYNGICQTHEQQCVTLWGPGAKPAPGICFERVNSAGDPYGNCGKVSKSSFAKCEMRDAKCGKIQCQGGASRPVIGTNAVSIETNIPLQQGGRILCRGTHVYLGDDMPDPGLVLAGTKCADGKICLNRQCQNISVFGVHECAMQCHGRGVCNNRKNCHCEAHWAPPFCDKFGFGGSTDSGPIRQAGKEARQEAAESNRERGQGQEPVGSQEHASTASLTLI

SEQ ID NO: 259 - protein, 955 aa, Homo sapiens
MPGGAGAARLCLLAFALQPLRPRAAREPGWTRGSEEGSPKLQHELIIPQWKTSESPVREKHPLKAELRVMAEGRELILDLEKNEQLFAPSYTETHYTSSGNPQTTTRKLEDHCFYHGTVRETELSSVTLSTCRGIRGLITVSSNLSYVIEPLPDSKGQHLIYRSEHLKPPPGNCGFEHSKPTTRDWALQFTQQTKKRPRRMKREDLNSMKYVELYLVADYLEFQKNRRDQDATKHKLIEIANYVDKFYRSLNIRIALVGLEVWTHGNMCEVSENPYSTLWSFLSWRRKLLAQKYHDNAQLITGMSFHGTTIGLAPLMAMCSVYQSGGVNMDHSENAIGVAATMAHEMGHNFGMTHDSADCCSASAADGGCIMAAATGHPFPKVFNGCNRRELDRYLQSGGGMCLSNMPDTRMLYGGRRCGNGYLEDGEECDCGEEEECNNPCCNASNCTLRPGAECAHGSCCHQCKLLAPGTLCREQARQCDLPEFCTGKSPHCPTNFYQMDGTPCEGGQAYCYNGMCLTYQEQCQQLWGPGARPAPDLCFEKVNVAGDTFGNCGKDMNGEHRKCNMRDAKCGKIQCQSSEARPLESNAVPIDTTIIMNGRQIQCRGTHVYRGPEEEGDMLDPGLVMTGTKCGYNHICFEGQCRNTSFFETEGCGKKCNGHGVCNNNQNCHCLPGWAPPFCNTPGHGGSIDSGPMPPESVGPVVAGVLVAILVLAVLMLMYYCCRQNNKLGQLKPSALPSKLRQQFSCPFRVSQNSGTGHANPTFKLQTPQGKRKVINTPEILRKPSQPPPRPPPDYLRGGSPPAPLPAHLSRAARNSPGPGSQIERTESSRRPPPSRPIPPAPNCIVSQDFSRPRPPQKALPANPVPGRRSLPRPGGASPLRPPGAGPQQSRPLAALAPKVSPREALKVKAGTRGLQGGRCRVEKTKQFMLLVVWTELPEQKPRAKHSCFLVPA

SEQ ID NO: 260 - protein, 918 aa, Homo sapiens
MPGGAGAARLCLLAFALQPLRPRAAREPGWTRGSEEGSPKLQHELIIPQWKTSESPVREKHPLKAELRVMAEGRELILDLEKNEQLFAPSYTETHYTSSGNPQTTTRKLEDHCFYHGTVRETELSSVTLSTCRGIRGLITVSSNLSYVIEPLPDSKGQHLIYRSEHLKPPPGNCGFEHSKPTTRDWALQFTQQTKKRPRRMKREDLNSMKYVELYLVADYLEFQKNRRDQDATKHKLIEIANYVDKFYRSLNIRIALVGLEVWTHGNMCEVSENPYSTLWSFLSWRRKLLAQKYHDNAQLITGMSFHGTTIGLAPLMAMCSVYQSGGVNMDHSENAIGVAATMAHEMGHNFGMTHDSADCCSASAADGGCIMAAATGHPFPKVFNGCNRRELDRYLQSGGGMCLSNMPDTRMLYGGRRCGNGYLEDGEECDCGEEEECNNPCCNASNCTLRPGAECAHGSCCHQCKLLAPGTLCREQARQCDLPEFCTGKSPHCPTNFYQMDGTPCEGGQAYCYNGMCLTYQEQCQQLWGPGARPAPDLCFEKVNVAGDTFGNCGKDMNGEHRKCNMRDAKCGKIQCQSSEARPLESNAVPIDTTIIMNGRQIQCRGTHVYRGPEEEGDMLDPGLVMTGTKCGYNHICFEGQCRNTSFFETEGCGKKCNGHGVCNNNQNCHCLPGWAPPFCNTPGHGGSIDSGPMPPESVGPVVAGVLVAILVLAVLMLMYYCCRQNNKLGQLKPSALPSKLRQQFSCPFRVSQNSGTGHANPTFKLQTPQGKRKVINTPEILRKPSQPPPRPPPDYLRGGSPPAPLPAHLSRAARNSPGPGSQIERTESSRRPPPSRPIPPAPNCIVSQDFSRPRPPQKALPANPVPGRRSLPRPGGASPLRPPGAGPQQSRPLAALAPKFPEYRSQRAGGMISSKI

SEQ ID NO: 261 - protein, 155 aa, Homo sapiens
MAEGEITTFTALTEKFNLPPGNYKKPKLLYCSNGGHFLRILPDGTVDGTRDRSDQHIQLQLSAESVGEVYIKSTETGQYLAMDTDGLLYGSQTPNEECLFLERLEENHYNTYISKKHAEKNWFVGLKKNGSCKRGPRTHYGQKAILFLPLPVSSD

SEQ ID NO: 262 - protein, 60 aa, Homo sapiens
MAEGEITTFTALTEKFNLPPGNYKKPKLLYCSNGGHFLRILPDGTVDGTRDRSDQHTDTK

SEQ ID NO: 263 - protein, 159 aa, Homo sapiens
MTLEEVRGQDTVPESTARMQGAGKALHELLLSAQRQGCLTAGVYESAKVLNVDPDNVTFCVLAAGEEDEGDIALQIHFTLIQAFCCENDIDIVRVGDVQRLAAIVGAGEEAGAPGDLHCILISNPNEDAWKDPALEKLSLFCEESRSVNDWVPSITLPE

SEQ ID NO: 264 - protein, 281 aa, Homo sapiens
MKLAAMIKKMCPSDSELSIPAKNCYRMVILGSSKVGKTAIVSRFLTGRFEDAYTPTIEDFHRKFYSIRGEVYQLDILDTSGNHPFPAMRRLSILTGDVFILVFSLDNRDSFEEVQRLRQQILDTKSCLKNKTKENVDVPLVICGNKGDRDFYREVDQREIEQLVGDDPQRCAYFEISAKKNSSLDQMFRALFAMAKLPSEMSPDLHRKVSVQYCDVLHKKALRNKKLLRAGSGGGGGDPGDAFGIVAPFARRPSVHSDLMYIREKASAGSQAKDKERCVIS

SEQ ID NO: 265 - protein, 122 aa, Homo sapiens
MKLAAMIKKMCPSDSELSIPAKNCYRMVILGSSKVGKTAIVSRFLTGRFEDAYTPTIEDFHRKFYSIRGEVYQLDILDTSGNHPFPAMRRLSILTDPRHQVLPQEQNQGERGRAPGHLRQQG

SEQ ID NO: 266 - protein, 202 aa, Homo sapiens
MCRTLAAFPTTCLERAKEFKTRLGIFLHKSELGCDTGSTGKFEWGSKHSKENRNFSEDVLGWRESFDLLLSSKNGVAAFHAFLKTEFSEENLEFWLACEEFKKIRSATKLASRAHQIFEEFICSEAPKEVNIDHETHELTRMNLQTATATCFDAAQGKTRTLMEKDSYPRFLKSPAYRDLAAQASAASATLSSCSLDEPSHT
